United States Patent Application Publication US 2026/0366028 A1, published November 19, 2026 (application 19/124,226).

The application's sequence listing, which the Patent Office published only in electronic form, follows.

SEQUENCE LISTING (483 sequences)

SEQ ID NO: 1 - DNA, 530 bp, unidentified
  source 1..530: mol_type = unassigned DNA
gggcaggtgagtggctgtggggagaggggttgtcgggctgggccgagctgaccctcgtttccccacaggggccctggctatggatccaaatttctggctgcaagtgcaggagtcagtgacggtacaggagggtttgtgcgtcctcgtgccctgcactttcttccatcccataccctactacgacaagaactccccagttcatggttactggttccgggaaggagccattatatccagggactctccagtggccacaaacaagctagatcaagaagtacaggaggagactcagggcagattccgcctccttggggatcccagtaggaacaactgctccctgagcatcgtagacgccaggaggagggataatggttcatacttctttcggatggagagaggaagtaccaaatacagttacaaatctccccagctctctgtgcatgtgacaggtgaggcacaggcttcagaagtggccgcaagggaagttcatgggtactgcagggcagggctgggatgggaccctggtactg

SEQ ID NO: 2 - DNA, 25 bp, synthetic construct
  source 1..25: mol_type = other DNA
  modified_base 1: mod_base = OTHER; note = Sarcosine attached via phosphorodiamidate to nucleotide
  modified_base 1..25: mod_base = OTHER; note = Phosphorodiamidate morpholino backbone
cctcacctgtcacatgcacagagag

SEQ ID NO: 3 - DNA, 25 bp, synthetic construct
  source 1..25: mol_type = other DNA
  modified_base 1: mod_base = OTHER; note = Sarcosine attached via phosphorodiamidate to nucleotide
  modified_base 1..25: mod_base = OTHER; note = Phosphorodiamidate morpholino backbone
cctgtcacatgcacagagagctggg

SEQ ID NO: 4 - DNA, 25 bp, synthetic construct
  source 1..25: mol_type = other DNA
  modified_base 1: mod_base = OTHER; note = Sarcosine attached via phosphorodiamidate to nucleotide
  modified_base 1..25: mod_base = OTHER; note = Phosphorodiamidate morpholino backbone
atttggtacttcctctctccatccg

SEQ ID NO: 5 - DNA, 25 bp, synthetic construct
  source 1..25: mol_type = other DNA
  modified_base 1: mod_base = OTHER; note = Sarcosine attached via phosphorodiamidate to nucleotide
  modified_base 1..25: mod_base = OTHER; note = Phosphorodiamidate morpholino backbone
tctccatccgaaagaagtatgaacc

SEQ ID NO: 6 - DNA, 25 bp, synthetic construct
  source 1..25: mol_type = other DNA
  modified_base 1: mod_base = OTHER; note = Sarcosine attached via phosphorodiamidate to nucleotide
  modified_base 1..25: mod_base = OTHER; note = Phosphorodiamidate morpholino backbone
tgggatggaagaaagtgcagggcac

SEQ ID NO: 7 - DNA, 25 bp, synthetic construct
  source 1..25: mol_type = other DNA
  modified_base 1: mod_base = OTHER; note = Sarcosine attached via phosphorodiamidate to nucleotide
  modified_base 1..25: mod_base = OTHER; note = Phosphorodiamidate morpholino backbone
cagccagaaatttggatccatagcc

SEQ ID NO: 8 - DNA, 25 bp, synthetic construct
  source 1..25: mol_type = other DNA
  modified_base 1: mod_base = OTHER; note = Sarcosine attached via phosphorodiamidate to nucleotide
  modified_base 1..25: mod_base = OTHER; note = Phosphorodiamidate morpholino backbone
ccctgtggggaaacgagggtcagct

SEQ ID NO: 9 - RNA, 20 nt, synthetic construct
  source 1..20: mol_type = other RNA
  modified_base 1: mod_base = OTHER; note = 2'-O-methoxyethyl 5-methylcytosine with phosphorothioate linkage
  modified_base 2: mod_base = OTHER; note = 2'-O-methoxyethyl modified nucleotide with phosphorothioate linkage
  modified_base 3: mod_base = OTHER; note = 2'-O-methoxyethyl 5-methylcytosine with phosphorothioate linkage
  modified_base 4: mod_base = OTHER; note = 2'-O-methoxyethyl modified nucleotide with phosphorothioate linkage
  modified_base 5: mod_base = OTHER; note = 2'-O-methoxyethyl modified thymine with phosphorothioate linkage
  modified_base 6: mod_base = OTHER; note = 2'-O-methoxyethyl modified nucleotide with phosphorothioate linkage
  modified_base 7: mod_base = OTHER; note = 2'-O-methoxyethyl 5-methylcytosine with phosphorothioate linkage
  modified_base 8: mod_base = OTHER; note = 2'-O-methoxyethyl modified nucleotide with phosphorothioate linkage
  modified_base 9: mod_base = OTHER; note = 2'-O-methoxyethyl 5-methylcytosine with phosphorothioate linkage
  modified_base 10: mod_base = OTHER; note = 2'-O-methoxyethyl modified nucleotide with phosphorothioate linkage
  modified_base 11: mod_base = OTHER; note = 2'-O-methoxyethyl modified nucleotide with phosphorothioate linkage
  modified_base 12: mod_base = OTHER; note = 2'-O-methoxyethyl modified nucleotide with phosphorothioate linkage
  modified_base 13: mod_base = OTHER; note = 2'-O-methoxyethyl modified nucleotide with phosphorothioate linkage
  modified_base 14: mod_base = OTHER; note = 2'-O-methoxyethyl modified nucleotide with phosphorothioate linkage
  modified_base 15: mod_base = OTHER; note = 2'-O-methoxyethyl modified nucleotide with phosphorothioate linkage
  modified_base 16: mod_base = OTHER; note = 2'-O-methoxyethyl 5-methylcytosine with phosphorothioate linkage
  modified_base 17: mod_base = OTHER; note = 2'-O-methoxyethyl modified thymine with phosphorothioate linkage
  modified_base 18: mod_base = OTHER; note = 2'-O-methoxyethyl modified nucleotide with phosphorothioate linkage
  modified_base 19: mod_base = OTHER; note = 2'-O-methoxyethyl modified nucleotide with phosphorothioate linkage
  modified_base 20: mod_base = OTHER; note = 2'-O-methoxyethyl modified nucleotide
cacatgcacagagagctggg

SEQ ID NO: 10 - RNA, 20 nt, synthetic construct
  source 1..20: mol_type = other RNA
  modified_base 1: mod_base = OTHER; note = 2'-O-methoxyethyl modified nucleotide with phosphorothioate linkage
  modified_base 2: mod_base = OTHER; note = 2'-O-methoxyethyl modified nucleotide with phosphorothioate linkage
  modified_base 3: mod_base = OTHER; note = 2'-O-methoxyethyl modified nucleotide with phosphorothioate linkage
  modified_base 4: mod_base = OTHER; note = 2'-O-methoxyethyl modified nucleotide with phosphorothioate linkage
  modified_base 5: mod_base = OTHER; note = 2'-O-methoxyethyl modified nucleotide with phosphorothioate linkage
  modified_base 6: mod_base = OTHER; note = 2'-O-methoxyethyl 5-methylcytosine with phosphorothioate linkage
  modified_base 7: mod_base = OTHER; note = 2'-O-methoxyethyl modified thymine with phosphorothioate linkage
  modified_base 8: mod_base = OTHER; note = 2'-O-methoxyethyl modified nucleotide with phosphorothioate linkage
  modified_base 9: mod_base = OTHER; note = 2'-O-methoxyethyl modified nucleotide with phosphorothioate linkage
  modified_base 10: mod_base = OTHER; note = 2'-O-methoxyethyl modified nucleotide with phosphorothioate linkage
  modified_base 11: mod_base = OTHER; note = 2'-O-methoxyethyl modified nucleotide with phosphorothioate linkage
  modified_base 12: mod_base = OTHER; note = 2'-O-methoxyethyl modified nucleotide with phosphorothioate linkage
  modified_base 13: mod_base = OTHER; note = 2'-O-methoxyethyl modified nucleotide with phosphorothioate linkage
  modified_base 14: mod_base = OTHER; note = 2'-O-methoxyethyl modified nucleotide with phosphorothioate linkage
  modified_base 15: mod_base = OTHER; note = 2'-O-methoxyethyl modified thymine with phosphorothioate linkage
  modified_base 16: mod_base = OTHER; note = 2'-O-methoxyethyl modified thymine with phosphorothioate linkage
  modified_base 17: mod_base = OTHER; note = 2'-O-methoxyethyl modified thymine with phosphorothioate linkage
  modified_base 18: mod_base = OTHER; note = 2'-O-methoxyethyl modified nucleotide with phosphorothioate linkage
  modified_base 19: mod_base = OTHER; note = 2'-O-methoxyethyl modified thymine with phosphorothioate linkage
  modified_base 20: mod_base = OTHER; note = 2'-O-methoxyethyl modified nucleotide
gagagctggggagatttgta

SEQ ID NO: 11 - RNA, 20 nt, synthetic construct
  source 1..20: mol_type = other RNA
  modified_base 1: mod_base = OTHER; note = 2'-O-methoxyethyl modified thymine with phosphorothioate linkage
  modified_base 2: mod_base = OTHER; note = 2'-O-methoxyethyl 5-methylcytosine with phosphorothioate linkage
  modified_base 3: mod_base = OTHER; note = 2'-O-methoxyethyl modified thymine with phosphorothioate linkage
  modified_base 4: mod_base = OTHER; note = 2'-O-methoxyethyl 5-methylcytosine with phosphorothioate linkage
  modified_base 5: mod_base = OTHER; note = 2'-O-methoxyethyl 5-methylcytosine with phosphorothioate linkage
  modified_base 6: mod_base = OTHER; note = 2'-O-methoxyethyl modified nucleotide with phosphorothioate linkage
  modified_base 7: mod_base = OTHER; note = 2'-O-methoxyethyl modified thymine with phosphorothioate linkage
  modified_base 8: mod_base = OTHER; note = 2'-O-methoxyethyl 5-methylcytosine with phosphorothioate linkage
  modified_base 9: mod_base = OTHER; note = 2'-O-methoxyethyl 5-methylcytosine with phosphorothioate linkage
  modified_base 10: mod_base = OTHER; note = 2'-O-methoxyethyl modified nucleotide with phosphorothioate linkage
  modified_base 11: mod_base = OTHER; note = 2'-O-methoxyethyl modified nucleotide with phosphorothioate linkage
  modified_base 12: mod_base = OTHER; note = 2'-O-methoxyethyl modified nucleotide with phosphorothioate linkage
  modified_base 13: mod_base = OTHER; note = 2'-O-methoxyethyl modified nucleotide with phosphorothioate linkage
  modified_base 14: mod_base = OTHER; note = 2'-O-methoxyethyl modified nucleotide with phosphorothioate linkage
  modified_base 15: mod_base = OTHER; note = 2'-O-methoxyethyl modified nucleotide with phosphorothioate linkage
  modified_base 16: mod_base = OTHER; note = 2'-O-methoxyethyl modified nucleotide with phosphorothioate linkage
  modified_base 17: mod_base = OTHER; note = 2'-O-methoxyethyl modified nucleotide with phosphorothioate linkage
  modified_base 18: mod_base = OTHER; note = 2'-O-methoxyethyl modified thymine with phosphorothioate linkage
  modified_base 19: mod_base = OTHER; note = 2'-O-methoxyethyl modified nucleotide with phosphorothioate linkage
  modified_base 20: mod_base = OTHER; note = 2'-O-methoxyethyl modified thymine
tctccatccgaaagaagtat

SEQ ID NO: 12 - RNA, 20 nt, synthetic construct
  source 1..20: mol_type = other RNA
  modified_base 1: mod_base = OTHER; note = 2'-O-methoxyethyl modified nucleotide with phosphorothioate linkage
  modified_base 2: mod_base = OTHER; note = 2'-O-methoxyethyl modified thymine with phosphorothioate linkage
  modified_base 3: mod_base = OTHER; note = 2'-O-methoxyethyl 5-methylcytosine with phosphorothioate linkage
  modified_base 4: mod_base = OTHER; note = 2'-O-methoxyethyl 5-methylcytosine with phosphorothioate linkage
  modified_base 5: mod_base = OTHER; note = 2'-O-methoxyethyl modified nucleotide with phosphorothioate linkage
  modified_base 6: mod_base = OTHER; note = 2'-O-methoxyethyl modified nucleotide with phosphorothioate linkage
  modified_base 7: mod_base = OTHER; note = 2'-O-methoxyethyl modified nucleotide with phosphorothioate linkage
  modified_base 8: mod_base = OTHER; note = 2'-O-methoxyethyl modified nucleotide with phosphorothioate linkage
  modified_base 9: mod_base = OTHER; note = 2'-O-methoxyethyl modified nucleotide with phosphorothioate linkage
  modified_base 10: mod_base = OTHER; note = 2'-O-methoxyethyl modified nucleotide with phosphorothioate linkage
  modified_base 11: mod_base = OTHER; note = 2'-O-methoxyethyl modified nucleotide with phosphorothioate linkage
  modified_base 12: mod_base = OTHER; note = 2'-O-methoxyethyl modified nucleotide with phosphorothioate linkage
  modified_base 13: mod_base = OTHER; note = 2'-O-methoxyethyl modified thymine with phosphorothioate linkage
  modified_base 14: mod_base = OTHER; note = 2'-O-methoxyethyl modified nucleotide with phosphorothioate linkage
  modified_base 15: mod_base = OTHER; note = 2'-O-methoxyethyl modified thymine with phosphorothioate linkage
  modified_base 16: mod_base = OTHER; note = 2'-O-methoxyethyl modified nucleotide with phosphorothioate linkage
  modified_base 17: mod_base = OTHER; note = 2'-O-methoxyethyl modified nucleotide with phosphorothioate linkage
  modified_base 18: mod_base = OTHER; note = 2'-O-methoxyethyl modified nucleotide with phosphorothioate linkage
  modified_base 19: mod_base = OTHER; note = 2'-O-methoxyethyl 5-methylcytosine with phosphorothioate linkage
  modified_base 20: mod_base = OTHER; note = 2'-O-methoxyethyl 5-methylcytosine
atccgaaagaagtatgaacc

SEQ ID NO: 13 - RNA, 20 nt, synthetic construct
  source 1..20: mol_type = other RNA
  modified_base 1: mod_base = OTHER; note = 2'-O-methoxyethyl modified nucleotide with phosphorothioate linkage
  modified_base 2: mod_base = OTHER; note = 2'-O-methoxyethyl modified thymine with phosphorothioate linkage
  modified_base 3: mod_base = OTHER; note = 2'-O-methoxyethyl modified nucleotide with phosphorothioate linkage
  modified_base 4: mod_base = OTHER; note = 2'-O-methoxyethyl 5-methylcytosine with phosphorothioate linkage
  modified_base 5: mod_base = OTHER; note = 2'-O-methoxyethyl modified thymine with phosphorothioate linkage
  modified_base 6: mod_base = OTHER; note = 2'-O-methoxyethyl 5-methylcytosine with phosphorothioate linkage
  modified_base 7: mod_base = OTHER; note = 2'-O-methoxyethyl modified nucleotide with phosphorothioate linkage
  modified_base 8: mod_base = OTHER; note = 2'-O-methoxyethyl modified nucleotide with phosphorothioate linkage
  modified_base 9: mod_base = OTHER; note = 2'-O-methoxyethyl modified nucleotide with phosphorothioate linkage
  modified_base 10: mod_base = OTHER; note = 2'-O-methoxyethyl modified nucleotide with phosphorothioate linkage
  modified_base 11: mod_base = OTHER; note = 2'-O-methoxyethyl modified nucleotide with phosphorothioate linkage
  modified_base 12: mod_base = OTHER; note = 2'-O-methoxyethyl modified nucleotide with phosphorothioate linkage
  modified_base 13: mod_base = OTHER; note = 2'-O-methoxyethyl 5-methylcytosine with phosphorothioate linkage
  modified_base 14: mod_base = OTHER; note = 2'-O-methoxyethyl modified nucleotide with phosphorothioate linkage
  modified_base 15: mod_base = OTHER; note = 2'-O-methoxyethyl modified nucleotide with phosphorothioate linkage
  modified_base 16: mod_base = OTHER; note = 2'-O-methoxyethyl modified thymine with phosphorothioate linkage
  modified_base 17: mod_base = OTHER; note = 2'-O-methoxyethyl modified thymine with phosphorothioate linkage
  modified_base 18: mod_base = OTHER; note = 2'-O-methoxyethyl modified nucleotide with phosphorothioate linkage
  modified_base 19: mod_base = OTHER; note = 2'-O-methoxyethyl modified thymine with phosphorothioate linkage
  modified_base 20: mod_base = OTHER; note = 2'-O-methoxyethyl modified thymine
atgctcagggagcagttgtt

SEQ ID NO: 14 - RNA, 20 nt, synthetic construct
  source 1..20: mol_type = other RNA
  modified_base 1: mod_base = OTHER; note = 2'-O-methoxyethyl modified nucleotide with phosphorothioate linkage
  modified_base 2: mod_base = OTHER; note = 2'-O-methoxyethyl modified nucleotide with phosphorothioate linkage
  modified_base 3: mod_base = OTHER; note = 2'-O-methoxyethyl modified nucleotide with phosphorothioate linkage
  modified_base 4: mod_base = OTHER; note = 2'-O-methoxyethyl modified thymine with phosphorothioate linkage
  modified_base 5: mod_base = OTHER; note = 2'-O-methoxyethyl 5-methylcytosine with phosphorothioate linkage
  modified_base 6: mod_base = OTHER; note = 2'-O-methoxyethyl modified thymine with phosphorothioate linkage
  modified_base 7: mod_base = OTHER; note = 2'-O-methoxyethyl 5-methylcytosine with phosphorothioate linkage
  modified_base 8: mod_base = OTHER; note = 2'-O-methoxyethyl 5-methylcytosine with phosphorothioate linkage
  modified_base 9: mod_base = OTHER; note = 2'-O-methoxyethyl modified thymine with phosphorothioate linkage
  modified_base 10: mod_base = OTHER; note = 2'-O-methoxyethyl 5-methylcytosine with phosphorothioate linkage
  modified_base 11: mod_base = OTHER; note = 2'-O-methoxyethyl 5-methylcytosine with phosphorothioate linkage
  modified_base 12: mod_base = OTHER; note = 2'-O-methoxyethyl modified thymine with phosphorothioate linkage
  modified_base 13: mod_base = OTHER; note = 2'-O-methoxyethyl modified nucleotide with phosphorothioate linkage
  modified_base 14: mod_base = OTHER; note = 2'-O-methoxyethyl modified thymine with phosphorothioate linkage
  modified_base 15: mod_base = OTHER; note = 2'-O-methoxyethyl modified nucleotide with phosphorothioate linkage
  modified_base 16: mod_base = OTHER; note = 2'-O-methoxyethyl 5-methylcytosine with phosphorothioate linkage
  modified_base 17: mod_base = OTHER; note = 2'-O-methoxyethyl modified thymine with phosphorothioate linkage
  modified_base 18: mod_base = OTHER; note = 2'-O-methoxyethyl modified thymine with phosphorothioate linkage
  modified_base 19: mod_base = OTHER; note = 2'-O-methoxyethyl 5-methylcytosine with phosphorothioate linkage
  modified_base 20: mod_base = OTHER; note = 2'-O-methoxyethyl modified thymine
gagtctcctcctgtacttct

SEQ ID NO: 15 - RNA, 20 nt, synthetic construct
  source 1..20: mol_type = other RNA
  modified_base 1: mod_base = OTHER; note = 2'-O-methoxyethyl 5-methylcytosine with phosphorothioate linkage
  modified_base 2: mod_base = OTHER; note = 2'-O-methoxyethyl modified nucleotide with phosphorothioate linkage
  modified_base 3: mod_base = OTHER; note = 2'-O-methoxyethyl 5-methylcytosine with phosphorothioate linkage
  modified_base 4: mod_base = OTHER; note = 2'-O-methoxyethyl modified nucleotide with phosphorothioate linkage
  modified_base 5: mod_base = OTHER; note = 2'-O-methoxyethyl 5-methylcytosine with phosphorothioate linkage
  modified_base 6: mod_base = OTHER; note = 2'-O-methoxyethyl modified nucleotide with phosphorothioate linkage
  modified_base 7: mod_base = OTHER; note = 2'-O-methoxyethyl modified nucleotide with phosphorothioate linkage
  modified_base 8: mod_base = OTHER; note = 2'-O-methoxyethyl modified nucleotide with phosphorothioate linkage
  modified_base 9: mod_base = OTHER; note = 2'-O-methoxyethyl 5-methylcytosine with phosphorothioate linkage
  modified_base 10: mod_base = OTHER; note = 2'-O-methoxyethyl 5-methylcytosine with phosphorothioate linkage
  modified_base 11: mod_base = OTHER; note = 2'-O-methoxyethyl 5-methylcytosine with phosphorothioate linkage
  modified_base 12: mod_base = OTHER; note = 2'-O-methoxyethyl modified thymine with phosphorothioate linkage
  modified_base 13: mod_base = OTHER; note = 2'-O-methoxyethyl 5-methylcytosine with phosphorothioate linkage
  modified_base 14: mod_base = OTHER; note = 2'-O-methoxyethyl 5-methylcytosine with phosphorothioate linkage
  modified_base 15: mod_base = OTHER; note = 2'-O-methoxyethyl modified thymine with phosphorothioate linkage
  modified_base 16: mod_base = OTHER; note = 2'-O-methoxyethyl modified nucleotide with phosphorothioate linkage
  modified_base 17: mod_base = OTHER; note = 2'-O-methoxyethyl modified thymine with phosphorothioate linkage
  modified_base 18: mod_base = OTHER; note = 2'-O-methoxyethyl modified nucleotide with phosphorothioate linkage
  modified_base 19: mod_base = OTHER; note = 2'-O-methoxyethyl 5-methylcytosine with phosphorothioate linkage
  modified_base 20: mod_base = OTHER; note = 2'-O-methoxyethyl 5-methylcytosine
cgcacaaaccctcctgtacc

SEQ ID NO: 16 - DNA, 25 bp, synthetic construct
  source 1..25: mol_type = other DNA
  modified_base 1: mod_base = OTHER; note = Sarcosine attached via phosphorodiamidate to nucleotide
  modified_base 1..25: mod_base = OTHER; note = Phosphorodiamidate morpholino backbone
cagtaccagggtcccatcccagccc

SEQ ID NO: 17 - DNA, 25 bp, synthetic construct
  source 1..25: mol_type = other DNA
  modified_base 1: mod_base = OTHER; note = Sarcosine attached via phosphorodiamidate to nucleotide
  modified_base 1..25: mod_base = OTHER; note = Phosphorodiamidate morpholino backbone
ccagggtcccatcccagccctgccc

SEQ ID NO: 18 - DNA, 25 bp, synthetic construct
  source 1..25: mol_type = other DNA
  modified_base 1: mod_base = OTHER; note = Sarcosine attached via phosphorodiamidate to nucleotide
  modified_base 1..25: mod_base = OTHER; note = Phosphorodiamidate morpholino backbone
gtcccatcccagccctgccctgcag

SEQ ID NO: 19 - DNA, 25 bp, synthetic construct
  source 1..25: mol_type = other DNA
  modified_base 1: mod_base = OTHER; note = Sarcosine attached via phosphorodiamidate to nucleotide
  modified_base 1..25: mod_base = OTHER; note = Phosphorodiamidate morpholino backbone
atcccagccctgccctgcagtaccc

SEQ ID NO: 20 - DNA, 25 bp, synthetic construct
  source 1..25: mol_type = other DNA
  modified_base 1: mod_base = OTHER; note = Sarcosine attached via phosphorodiamidate to nucleotide
  modified_base 1..25: mod_base = OTHER; note = Phosphorodiamidate morpholino backbone
agccctgccctgcagtacccatgaa

SEQ ID NO: 21 - DNA, 25 bp, synthetic construct
  source 1..25: mol_type = other DNA
  modified_base 1: mod_base = OTHER; note = Sarcosine attached via phosphorodiamidate to nucleotide
  modified_base 1..25: mod_base = OTHER; note = Phosphorodiamidate morpholino backbone
tgccctgcagtacccatgaacttcc

SEQ ID NO: 22 - DNA, 25 bp, synthetic construct
  source 1..25: mol_type = other DNA
  modified_base 1: mod_base = OTHER; note = Sarcosine attached via phosphorodiamidate to nucleotide
  modified_base 1..25: mod_base = OTHER; note = Phosphorodiamidate morpholino backbone
tgcagtacccatgaacttcccttgc

SEQ ID NO: 23 - DNA, 25 bp, synthetic construct
  source 1..25: mol_type = other DNA
  modified_base 1: mod_base = OTHER; note = Sarcosine attached via phosphorodiamidate to nucleotide
  modified_base 1..25: mod_base = OTHER; note = Phosphorodiamidate morpholino backbone
tacccatgaacttcccttgcggcca

SEQ ID NO: 24 - DNA, 25 bp, synthetic construct
  source 1..25: mol_type = other DNA
  modified_base 1: mod_base = OTHER; note = Sarcosine attached via phosphorodiamidate to nucleotide
  modified_base 1..25: mod_base = OTHER; note = Phosphorodiamidate morpholino backbone
atgaacttcccttgcggccacttct

SEQ ID NO: 25 - DNA, 25 bp, synthetic construct
  source 1..25: mol_type = other DNA
  modified_base 1: mod_base = OTHER; note = Sarcosine attached via phosphorodiamidate to nucleotide
  modified_base 1..25: mod_base = OTHER; note = Phosphorodiamidate morpholino backbone
cttcccttgcggccacttctgaagc

SEQ ID NO: 26 - DNA, 25 bp, synthetic construct
  source 1..25: mol_type = other DNA
  modified_base 1: mod_base = OTHER; note = Sarcosine attached via phosphorodiamidate to nucleotide
  modified_base 1..25: mod_base = OTHER; note = Phosphorodiamidate morpholino backbone
cttgcggccacttctgaagcctgtg

SEQ ID NO: 27 - DNA, 25 bp, synthetic construct
  source 1..25: mol_type = other DNA
  modified_base 1: mod_base = OTHER; note = Sarcosine attached via phosphorodiamidate to nucleotide
  modified_base 1..25: mod_base = OTHER; note = Phosphorodiamidate morpholino backbone
ggccacttctgaagcctgtgcctca

SEQ ID NO: 28 - DNA, 25 bp, synthetic construct
  source 1..25: mol_type = other DNA
  modified_base 1: mod_base = OTHER; note = Sarcosine attached via phosphorodiamidate to nucleotide
  modified_base 1..25: mod_base = OTHER; note = Phosphorodiamidate morpholino backbone
cttctgaagcctgtgcctcacctgt

SEQ ID NO: 29 - DNA, 25 bp, synthetic construct
  source 1..25: mol_type = other DNA
  modified_base 1: mod_base = OTHER; note = Sarcosine attached via phosphorodiamidate to nucleotide
  modified_base 1..25: mod_base = OTHER; note = Phosphorodiamidate morpholino backbone
gaagcctgtgcctcacctgtcacat

SEQ ID NO: 30 - DNA, 25 bp, synthetic construct
  source 1..25: mol_type = other DNA
  modified_base 1: mod_base = OTHER; note = Sarcosine attached via phosphorodiamidate to nucleotide
  modified_base 1..25: mod_base = OTHER; note = Phosphorodiamidate morpholino backbone
ctgtgcctcacctgtcacatgcaca

SEQ ID NO: 31 - DNA, 25 bp, synthetic construct
  source 1..25: mol_type = other DNA
  modified_base 1: mod_base = OTHER; note = Sarcosine attached via phosphorodiamidate to nucleotide
  modified_base 1..25: mod_base = OTHER; note = Phosphorodiamidate morpholino backbone
cacatgcacagagagctggggagat

SEQ ID NO: 32 - DNA, 25 bp, synthetic construct
  source 1..25: mol_type = other DNA
  modified_base 1: mod_base = OTHER; note = Sarcosine attached via phosphorodiamidate to nucleotide
  modified_base 1..25: mod_base = OTHER; note = Phosphorodiamidate morpholino backbone
gcacagagagctggggagatttgta

SEQ ID NO: 33 - DNA, 25 bp, synthetic construct
  source 1..25: mol_type = other DNA
  modified_base 1: mod_base = OTHER; note = Sarcosine attached via phosphorodiamidate to nucleotide
  modified_base 1..25: mod_base = OTHER; note = Phosphorodiamidate morpholino backbone
gagagctggggagatttgtaactgt

SEQ ID NO: 34 - DNA, 25 bp, synthetic construct
  source 1..25: mol_type = other DNA
  modified_base 1: mod_base = OTHER; note = Sarcosine attached via phosphorodiamidate to nucleotide
  modified_base 1..25: mod_base = OTHER; note = Phosphorodiamidate morpholino backbone
ctggggagatttgtaactgtatttg

SEQ ID NO: 35 - DNA, 25 bp, synthetic construct
  source 1..25: mol_type = other DNA
  modified_base 1: mod_base = OTHER; note = Sarcosine attached via phosphorodiamidate to nucleotide
  modified_base 1..25: mod_base = OTHER; note = Phosphorodiamidate morpholino backbone
gagatttgtaactgtatttggtact

SEQ ID NO: 36 - DNA, 25 bp, synthetic construct
  source 1..25: mol_type = other DNA
  modified_base 1: mod_base = OTHER; note = Sarcosine attached via phosphorodiamidate to nucleotide
  modified_base 1..25: mod_base = OTHER; note = Phosphorodiamidate morpholino backbone
ttgtaactgtatttggtacttcctc

SEQ ID NO: 37 - DNA, 25 bp, synthetic construct
  source 1..25: mol_type = other DNA
  modified_base 1: mod_base = OTHER; note = Sarcosine attached via phosphorodiamidate to nucleotide
  modified_base 1..25: mod_base = OTHER; note = Phosphorodiamidate morpholino backbone
actgtatttggtacttcctctctcc

SEQ ID NO: 38 - DNA, 25 bp, synthetic construct
  source 1..25: mol_type = other DNA
  modified_base 1: mod_base = OTHER; note = Sarcosine attached via phosphorodiamidate to nucleotide
  modified_base 1..25: mod_base = OTHER; note = Phosphorodiamidate morpholino backbone
gtacttcctctctccatccgaaaga

SEQ ID NO: 39 - DNA, 25 bp, synthetic construct
  source 1..25: mol_type = other DNA
  modified_base 1: mod_base = OTHER; note = Sarcosine attached via phosphorodiamidate to nucleotide
  modified_base 1..25: mod_base = OTHER; note = Phosphorodiamidate morpholino backbone
tcctctctccatccgaaagaagtat

SEQ ID NO: 40 - DNA, 25 bp, synthetic construct
  source 1..25: mol_type = other DNA
  modified_base 1: mod_base = OTHER; note = Sarcosine attached via phosphorodiamidate to nucleotide
  modified_base 1..25: mod_base = OTHER; note = Phosphorodiamidate morpholino backbone
atccgaaagaagtatgaaccattat

SEQ ID NO: 41 - DNA, 25 bp, synthetic construct
  source 1..25: mol_type = other DNA
  modified_base 1: mod_base = OTHER; note = Sarcosine attached via phosphorodiamidate to nucleotide
  modified_base 1..25: mod_base = OTHER; note = Phosphorodiamidate morpholino backbone
aaagaagtatgaaccattatccctc

SEQ ID NO: 42 - DNA, 25 bp, synthetic construct
  source 1..25: mol_type = other DNA
  modified_base 1: mod_base = OTHER; note = Sarcosine attached via phosphorodiamidate to nucleotide
  modified_base 1..25: mod_base = OTHER; note = Phosphorodiamidate morpholino backbone
agtatgaaccattatccctcctcct

SEQ ID NO: 43 - DNA, 25 bp, synthetic construct
  source 1..25: mol_type = other DNA
  modified_base 1: mod_base = OTHER; note = Sarcosine attached via phosphorodiamidate to nucleotide
  modified_base 1..25: mod_base = OTHER; note = Phosphorodiamidate morpholino backbone
gaaccattatccctcctcctggcgt

SEQ ID NO: 44 - DNA, 25 bp, synthetic construct
  source 1..25: mol_type = other DNA
  modified_base 1: mod_base = OTHER; note = Sarcosine attached via phosphorodiamidate to nucleotide
  modified_base 1..25: mod_base = OTHER; note = Phosphorodiamidate morpholino backbone
attatccctcctcctggcgtctacg

SEQ ID NO: 45 - DNA, 25 bp, synthetic construct
  source 1..25: mol_type = other DNA
  modified_base 1: mod_base = OTHER; note = Sarcosine attached via phosphorodiamidate to nucleotide
  modified_base 1..25: mod_base = OTHER; note = Phosphorodiamidate morpholino backbone
ccctcctcctggcgtctacgatgct

SEQ ID NO: 46 - DNA, 25 bp, synthetic construct
  source 1..25: mol_type = other DNA
  modified_base 1: mod_base = OTHER; note = Sarcosine attached via phosphorodiamidate to nucleotide
  modified_base 1..25: mod_base = OTHER; note = Phosphorodiamidate morpholino backbone
ctcctggcgtctacgatgctcaggg

SEQ ID NO: 47 - DNA, 25 bp, synthetic construct
  source 1..25: mol_type = other DNA
  modified_base 1: mod_base = OTHER; note = Sarcosine attached via phosphorodiamidate to nucleotide
  modified_base 1..25: mod_base = OTHER; note = Phosphorodiamidate morpholino backbone
ggcgtctacgatgctcagggagcag

SEQ ID NO: 48 - DNA, 25 bp, synthetic construct
  source 1..25: mol_type = other DNA
  modified_base 1: mod_base = OTHER; note = Sarcosine attached via phosphorodiamidate to nucleotide
  modified_base 1..25: mod_base = OTHER; note = Phosphorodiamidate morpholino backbone
ctacgatgctcagggagcagttgtt

SEQ ID NO: 49 - DNA, 25 bp, synthetic construct
  source 1..25: mol_type = other DNA
  modified_base 1: mod_base = OTHER; note = Sarcosine attached via phosphorodiamidate to nucleotide
  modified_base 1..25: mod_base = OTHER; note = Phosphorodiamidate morpholino backbone
atgctcagggagcagttgttcctac

SEQ ID NO: 50 - DNA, 25 bp, synthetic construct
  source 1..25: mol_type = other DNA
  modified_base 1: mod_base = OTHER; note = Sarcosine attached via phosphorodiamidate to nucleotide
  modified_base 1..25: mod_base = OTHER; note = Phosphorodiamidate morpholino backbone
cagggagcagttgttcctactggga

SEQ ID NO: 51 - DNA, 25 bp, synthetic construct
  source 1..25: mol_type = other DNA
  modified_base 1: mod_base = OTHER; note = Sarcosine attached via phosphorodiamidate to nucleotide
  modified_base 1..25: mod_base = OTHER; note = Phosphorodiamidate morpholino backbone
agcagttgttcctactgggatcccc

SEQ ID NO: 52 - DNA, 25 bp, synthetic construct
  source 1..25: mol_type = other DNA
  modified_base 1: mod_base = OTHER; note = Sarcosine attached via phosphorodiamidate to nucleotide
  modified_base 1..25: mod_base = OTHER; note = Phosphorodiamidate morpholino backbone
ttgttcctactgggatccccaagga

SEQ ID NO: 53 - DNA, 25 bp, synthetic construct
  source 1..25: mol_type = other DNA
  modified_base 1: mod_base = OTHER; note = Sarcosine attached via phosphorodiamidate to nucleotide
  modified_base 1..25: mod_base = OTHER; note = Phosphorodiamidate morpholino backbone
cctactgggatccccaaggaggcgg

SEQ ID NO: 54 - DNA, 25 bp, synthetic construct
  source 1..25: mol_type = other DNA
  modified_base 1: mod_base = OTHER; note = Sarcosine attached via phosphorodiamidate to nucleotide
  modified_base 1..25: mod_base = OTHER; note = Phosphorodiamidate morpholino backbone
tgggatccccaaggaggcggaatct

SEQ ID NO: 55 - DNA, 25 bp, synthetic construct
  source 1..25: mol_type = other DNA
  modified_base 1: mod_base = OTHER; note = Sarcosine attached via phosphorodiamidate to nucleotide
  modified_base 1..25: mod_base = OTHER; note = Phosphorodiamidate morpholino backbone
tccccaaggaggcggaatctgccct

SEQ ID NO: 56 - DNA, 25 bp, synthetic construct
  source 1..25: mol_type = other DNA
  modified_base 1: mod_base = OTHER; note = Sarcosine attached via phosphorodiamidate to nucleotide
  modified_base 1..25: mod_base = OTHER; note = Phosphorodiamidate morpholino backbone
aaggaggcggaatctgccctgagtc

SEQ ID NO: 57 - DNA, 25 bp, synthetic construct
  source 1..25: mol_type = other DNA
  modified_base 1: mod_base = OTHER; note = Sarcosine attached via phosphorodiamidate to nucleotide
  modified_base 1..25: mod_base = OTHER; note = Phosphorodiamidate morpholino backbone
ggcggaatctgccctgagtctcctc

SEQ ID NO: 58 - DNA, 25 bp, synthetic construct
  source 1..25: mol_type = other DNA
  modified_base 1: mod_base = OTHER; note = Sarcosine attached via phosphorodiamidate to nucleotide
  modified_base 1..25: mod_base = OTHER; note = Phosphorodiamidate morpholino backbone
aatctgccctgagtctcctcctgta

SEQ ID NO: 59 - DNA, 25 bp, synthetic construct
  source 1..25: mol_type = other DNA
  modified_base 1: mod_base = OTHER; note = Sarcosine attached via phosphorodiamidate to nucleotide
  modified_base 1..25: mod_base = OTHER; note = Phosphorodiamidate morpholino backbone
gccctgagtctcctcctgtacttct

SEQ ID NO: 60 - DNA, 25 bp, synthetic construct
  source 1..25: mol_type = other DNA
  modified_base 1: mod_base = OTHER; note = Sarcosine attached via phosphorodiamidate to nucleotide
  modified_base 1..25: mod_base = OTHER; note = Phosphorodiamidate morpholino backbone
gagtctcctcctgtacttcttgatc

SEQ ID NO: 61 - DNA, 25 bp, synthetic construct
  source 1..25: mol_type = other DNA
  modified_base 1: mod_base = OTHER; note = Sarcosine attached via phosphorodiamidate to nucleotide
  modified_base 1..25: mod_base = OTHER; note = Phosphorodiamidate morpholino backbone
tcctcctgtacttcttgatctagct

SEQ ID NO: 62 - DNA, 25 bp, synthetic construct
  source 1..25: mol_type = other DNA
  modified_base 1: mod_base = OTHER; note = Sarcosine attached via phosphorodiamidate to nucleotide
  modified_base 1..25: mod_base = OTHER; note = Phosphorodiamidate morpholino backbone
ctgtacttcttgatctagcttgttt

SEQ ID NO: 63 - DNA, 25 bp, synthetic construct
  source 1..25: mol_type = other DNA
  modified_base 1: mod_base = OTHER; note = Sarcosine attached via phosphorodiamidate to nucleotide
  modified_base 1..25: mod_base = OTHER; note = Phosphorodiamidate morpholino backbone
cttcttgatctagcttgtttgtggc

SEQ ID NO: 64 - DNA, 25 bp, synthetic construct
  source 1..25: mol_type = other DNA
  modified_base 1: mod_base = OTHER; note = Sarcosine attached via phosphorodiamidate to nucleotide
  modified_base 1..25: mod_base = OTHER; note = Phosphorodiamidate morpholino backbone
tgatctagcttgtttgtggccactg

SEQ ID NO: 65 - DNA, 25 bp, synthetic construct
  source 1..25: mol_type = other DNA
  modified_base 1: mod_base = OTHER; note = Sarcosine attached via phosphorodiamidate to nucleotide
  modified_base 1..25: mod_base = OTHER; note = Phosphorodiamidate morpholino backbone
tagcttgtttgtggccactggagag

SEQ ID NO: 66 - DNA, 25 bp, synthetic construct
  source 1..25: mol_type = other DNA
  modified_base 1: mod_base = OTHER; note = Sarcosine attached via phosphorodiamidate to nucleotide
  modified_base 1..25: mod_base = OTHER; note = Phosphorodiamidate morpholino backbone
tgtttgtggccactggagagtccct

SEQ ID NO: 67 - DNA, 25 bp, synthetic construct
  source 1..25: mol_type = other DNA
  modified_base 1: mod_base = OTHER; note = Sarcosine attached via phosphorodiamidate to nucleotide
  modified_base 1..25: mod_base = OTHER; note = Phosphorodiamidate morpholino backbone
gtggccactggagagtccctggata

SEQ ID NO: 68 - DNA, 25 bp, synthetic construct
  source 1..25: mol_type = other DNA
  modified_base 1: mod_base = OTHER; note = Sarcosine attached via phosphorodiamidate to nucleotide
  modified_base 1..25: mod_base = OTHER; note = Phosphorodiamidate morpholino backbone
cactggagagtccctggatataatg

SEQ ID NO: 69 - DNA, 25 bp, synthetic construct
  source 1..25: mol_type = other DNA
  modified_base 1: mod_base = OTHER; note = Sarcosine attached via phosphorodiamidate to nucleotide
  modified_base 1..25: mod_base = OTHER; note = Phosphorodiamidate morpholino backbone
gagagtccctggatataatggctcc

SEQ ID NO: 70 - DNA, 25 bp, synthetic construct
  source 1..25: mol_type = other DNA
  modified_base 1: mod_base = OTHER; note = Sarcosine attached via phosphorodiamidate to nucleotide
  modified_base 1..25: mod_base = OTHER; note = Phosphorodiamidate morpholino backbone
tccctggatataatggctccttccc

SEQ ID NO: 71 - DNA, 25 bp, synthetic construct
  source 1..25: mol_type = other DNA
  modified_base 1: mod_base = OTHER; note = Sarcosine attached via phosphorodiamidate to nucleotide
  modified_base 1..25: mod_base = OTHER; note = Phosphorodiamidate morpholino backbone
ggatataatggctccttcccggaac

SEQ ID NO: 72 - DNA, 25 bp, synthetic construct
  source 1..25: mol_type = other DNA
  modified_base 1: mod_base = OTHER; note = Sarcosine attached via phosphorodiamidate to nucleotide
  modified_base 1..25: mod_base = OTHER; note = Phosphorodiamidate morpholino backbone
taatggctccttcccggaaccagta

SEQ ID NO: 73 - DNA, 25 bp, synthetic construct
  source 1..25: mol_type = other DNA
  modified_base 1: mod_base = OTHER; note = Sarcosine attached via phosphorodiamidate to nucleotide
  modified_base 1..25: mod_base = OTHER; note = Phosphorodiamidate morpholino backbone
gctccttcccggaaccagtaaccat

SEQ ID NO: 74 - DNA, 25 bp, synthetic construct
  source 1..25: mol_type = other DNA
  modified_base 1: mod_base = OTHER; note = Sarcosine attached via phosphorodiamidate to nucleotide
  modified_base 1..25: mod_base = OTHER; note = Phosphorodiamidate morpholino backbone
ttcccggaaccagtaaccatgaact

SEQ ID NO: 75 - DNA, 25 bp, synthetic construct
  source 1..25: mol_type = other DNA
  modified_base 1: mod_base = OTHER; note = Sarcosine attached via phosphorodiamidate to nucleotide
  modified_base 1..25: mod_base = OTHER; note = Phosphorodiamidate morpholino backbone
ggaaccagtaaccatgaactgggga

SEQ ID NO: 76 - DNA, 25 bp, synthetic construct
  source 1..25: mol_type = other DNA
  modified_base 1: mod_base = OTHER; note = Sarcosine attached via phosphorodiamidate to nucleotide
  modified_base 1..25: mod_base = OTHER; note = Phosphorodiamidate morpholino backbone
cagtaaccatgaactggggagttct

SEQ ID NO: 77 - DNA, 25 bp, synthetic construct
  source 1..25: mol_type = other DNA
  modified_base 1: mod_base = OTHER; note = Sarcosine attached via phosphorodiamidate to nucleotide
  modified_base 1..25: mod_base = OTHER; note = Phosphorodiamidate morpholino backbone
accatgaactggggagttcttgtcg

SEQ ID NO: 78 - DNA, 25 bp, synthetic construct
  source 1..25: mol_type = other DNA
  modified_base 1: mod_base = OTHER; note = Sarcosine attached via phosphorodiamidate to nucleotide
  modified_base 1..25: mod_base = OTHER; note = Phosphorodiamidate morpholino backbone
gaactggggagttcttgtcgtagta

SEQ ID NO: 79 - DNA, 25 bp, synthetic construct
  source 1..25: mol_type = other DNA
  modified_base 1: mod_base = OTHER; note = Sarcosine attached via phosphorodiamidate to nucleotide
  modified_base 1..25: mod_base = OTHER; note = Phosphorodiamidate morpholino backbone
ggggagttcttgtcgtagtagggta

SEQ ID NO: 80 - DNA, 25 bp, synthetic construct
  source 1..25: mol_type = other DNA
  modified_base 1: mod_base = OTHER; note = Sarcosine attached via phosphorodiamidate to nucleotide
  modified_base 1..25: mod_base = OTHER; note = Phosphorodiamidate morpholino backbone
gttcttgtcgtagtagggtatggga

SEQ ID NO: 81 - DNA, 25 bp, synthetic construct
  source 1..25: mol_type = other DNA
  modified_base 1: mod_base = OTHER; note = Sarcosine attached via phosphorodiamidate to nucleotide
  modified_base 1..25: mod_base = OTHER; note = Phosphorodiamidate morpholino backbone
tgtcgtagtagggtatgggatggaa

SEQ ID NO: 82 - DNA, 25 bp, synthetic construct
  source 1..25: mol_type = other DNA
  modified_base 1: mod_base = OTHER; note = Sarcosine attached via phosphorodiamidate to nucleotide
  modified_base 1..25: mod_base = OTHER; note = Phosphorodiamidate morpholino backbone
tagtagggtatgggatggaagaaag

SEQ ID NO: 83 - DNA, 25 bp, synthetic construct
  source 1..25: mol_type = other DNA
  modified_base 1: mod_base = OTHER; note = Sarcosine attached via phosphorodiamidate to nucleotide
  modified_base 1..25: mod_base = OTHER; note = Phosphorodiamidate morpholino backbone
gggtatgggatggaagaaagtgcag

SEQ ID NO: 84 - DNA, 25 bp, synthetic construct
  source 1..25: mol_type = other DNA
  modified_base 1: mod_base = OTHER; note = Sarcosine attached via phosphorodiamidate to nucleotide
  modified_base 1..25: mod_base = OTHER; note = Phosphorodiamidate morpholino backbone
tggaagaaagtgcagggcacgagga

SEQ ID NO: 85 - DNA, 25 bp, synthetic construct
  source 1..25: mol_type = other DNA
  modified_base 1: mod_base = OTHER; note = Sarcosine attached via phosphorodiamidate to nucleotide
  modified_base 1..25: mod_base = OTHER; note = Phosphorodiamidate morpholino backbone
gaaagtgcagggcacgaggacgcac

SEQ ID NO: 86 - DNA, 25 bp, synthetic construct
  source 1..25: mol_type = other DNA
  modified_base 1: mod_base = OTHER; note = Sarcosine attached via phosphorodiamidate to nucleotide
  modified_base 1..25: mod_base = OTHER; note = Phosphorodiamidate morpholino backbone
tgcagggcacgaggacgcacaaacc

SEQ ID NO: 87 - DNA, 25 bp, synthetic construct
  source 1..25: mol_type = other DNA
  modified_base 1: mod_base = OTHER; note = Sarcosine attached via phosphorodiamidate to nucleotide
  modified_base 1..25: mod_base = OTHER; note = Phosphorodiamidate morpholino backbone
ggcacgaggacgcacaaaccctcct

SEQ ID NO: 88 - DNA, 25 bp, synthetic construct
  source 1..25: mol_type = other DNA
  modified_base 1: mod_base = OTHER; note = Sarcosine attached via phosphorodiamidate to nucleotide
  modified_base 1..25: mod_base = OTHER; note = Phosphorodiamidate morpholino backbone
gaggacgcacaaaccctcctgtacc

SEQ ID NO: 89 - DNA, 25 bp, synthetic construct
  source 1..25: mol_type = other DNA
  modified_base 1: mod_base = OTHER; note = Sarcosine attached via phosphorodiamidate to nucleotide
  modified_base 1..25: mod_base = OTHER; note = Phosphorodiamidate morpholino backbone
cgcacaaaccctcctgtaccgtcac

SEQ ID NO: 90 - DNA, 25 bp, synthetic construct
  source 1..25: mol_type = other DNA
  modified_base 1: mod_base = OTHER; note = Sarcosine attached via phosphorodiamidate to nucleotide
  modified_base 1..25: mod_base = OTHER; note = Phosphorodiamidate morpholino backbone
aaaccctcctgtaccgtcactgact

SEQ ID NO: 91 - DNA, 25 bp, synthetic construct
  source 1..25: mol_type = other DNA
  modified_base 1: mod_base = OTHER; note = Sarcosine attached via phosphorodiamidate to nucleotide
  modified_base 1..25: mod_base = OTHER; note = Phosphorodiamidate morpholino backbone
ctcctgtaccgtcactgactcctgc

SEQ ID NO: 92 - DNA, 25 bp, synthetic construct
  source 1..25: mol_type = other DNA
  modified_base 1: mod_base = OTHER; note = Sarcosine attached via phosphorodiamidate to nucleotide
  modified_base 1..25: mod_base = OTHER; note = Phosphorodiamidate morpholino backbone
gtaccgtcactgactcctgcacttg

SEQ ID NO: 93 - DNA, 25 bp, synthetic construct
  source 1..25: mol_type = other DNA
  modified_base 1: mod_base = OTHER; note = Sarcosine attached via phosphorodiamidate to nucleotide
  modified_base 1..25: mod_base = OTHER; note = Phosphorodiamidate morpholino backbone
gtcactgactcctgcacttgcagcc

SEQ ID NO: 94 - DNA, 25 bp, synthetic construct
  source 1..25: mol_type = other DNA
  modified_base 1: mod_base = OTHER; note = Sarcosine attached via phosphorodiamidate to nucleotide
  modified_base 1..25: mod_base = OTHER; note = Phosphorodiamidate morpholino backbone
tgactcctgcacttgcagccagaaa

SEQ ID NO: 95 - DNA, 25 bp, synthetic construct
  source 1..25: mol_type = other DNA
  modified_base 1: mod_base = OTHER; note = Sarcosine attached via phosphorodiamidate to nucleotide
  modified_base 1..25: mod_base = OTHER; note = Phosphorodiamidate morpholino backbone
cctgcacttgcagccagaaatttgg

SEQ ID NO: 96 - DNA, 25 bp, synthetic construct
  source 1..25: mol_type = other DNA
  modified_base 1: mod_base = OTHER; note = Sarcosine attached via phosphorodiamidate to nucleotide
  modified_base 1..25: mod_base = OTHER; note = Phosphorodiamidate morpholino backbone
acttgcagccagaaatttggatcca

SEQ ID NO: 97 - DNA, 25 bp, synthetic construct
  source 1..25: mol_type = other DNA
  modified_base 1: mod_base = OTHER; note = Sarcosine attached via phosphorodiamidate to nucleotide
  modified_base 1..25: mod_base = OTHER; note = Phosphorodiamidate morpholino backbone
agaaatttggatccatagccagggc

SEQ ID NO: 98 - DNA, 25 bp, synthetic construct
  source 1..25: mol_type = other DNA
  modified_base 1: mod_base = OTHER; note = Sarcosine attached via phosphorodiamidate to nucleotide
  modified_base 1..25: mod_base = OTHER; note = Phosphorodiamidate morpholino backbone
tttggatccatagccagggcccctg

SEQ ID NO: 99 - DNA, 25 bp, synthetic construct
  source 1..25: mol_type = other DNA
  modified_base 1: mod_base = OTHER; note = Sarcosine attached via phosphorodiamidate to nucleotide
  modified_base 1..25: mod_base = OTHER; note = Phosphorodiamidate morpholino backbone
atccatagccagggcccctgtgggg

SEQ ID NO: 100 - DNA, 25 bp, synthetic construct
  source 1..25: mol_type = other DNA
  modified_base 1: mod_base = OTHER; note = Sarcosine attached via phosphorodiamidate to nucleotide
  modified_base 1..25: mod_base = OTHER; note = Phosphorodiamidate morpholino backbone
tagccagggcccctgtggggaaacg

SEQ ID NO: 101 - DNA, 25 bp, synthetic construct
  source 1..25: mol_type = other DNA
  modified_base 1: mod_base = OTHER; note = Sarcosine attached via phosphorodiamidate to nucleotide
  modified_base 1..25: mod_base = OTHER; note = Phosphorodiamidate morpholino backbone
agggcccctgtggggaaacgagggt

SEQ ID NO: 102 - DNA, 25 bp, synthetic construct
  source 1..25: mol_type = other DNA
  modified_base 1: mod_base = OTHER; note = Sarcosine attached via phosphorodiamidate to nucleotide
  modified_base 1..25: mod_base = OTHER; note = Phosphorodiamidate morpholino backbone
tggggaaacgagggtcagctcggcc

SEQ ID NO: 103 - DNA, 25 bp, synthetic construct
  source 1..25: mol_type = other DNA
  modified_base 1: mod_base = OTHER; note = Sarcosine attached via phosphorodiamidate to nucleotide
  modified_base 1..25: mod_base = OTHER; note = Phosphorodiamidate morpholino backbone
aaacgagggtcagctcggcccagcc

SEQ ID NO: 104 - DNA, 25 bp, synthetic construct
  source 1..25: mol_type = other DNA
  modified_base 1: mod_base = OTHER; note = Sarcosine attached via phosphorodiamidate to nucleotide
  modified_base 1..25: mod_base = OTHER; note = Phosphorodiamidate morpholino backbone
agggtcagctcggcccagcccgaca

SEQ ID NO: 105 - DNA, 25 bp, synthetic construct
  source 1..25: mol_type = other DNA
  modified_base 1: mod_base = OTHER; note = Sarcosine attached via phosphorodiamidate to nucleotide
  modified_base 1..25: mod_base = OTHER; note = Phosphorodiamidate morpholino backbone
cagctcggcccagcccgacaacccc

SEQ ID NO: 106 - DNA, 25 bp, synthetic construct
  source 1..25: mol_type = other DNA
  modified_base 1: mod_base = OTHER; note = Sarcosine attached via phosphorodiamidate to nucleotide
  modified_base 1..25: mod_base = OTHER; note = Phosphorodiamidate morpholino backbone
cggcccagcccgacaacccctctcc

SEQ ID NO: 107 - DNA, 25 bp, synthetic construct
  source 1..25: mol_type = other DNA
  modified_base 1: mod_base = OTHER; note = Sarcosine attached via phosphorodiamidate to nucleotide
  modified_base 1..25: mod_base = OTHER; note = Phosphorodiamidate morpholino backbone
cagcccgacaacccctctccccaca

SEQ ID NO: 108 - DNA, 25 bp, synthetic construct
  source 1..25: mol_type = other DNA
  modified_base 1: mod_base = OTHER; note = Sarcosine attached via phosphorodiamidate to nucleotide
  modified_base 1..25: mod_base = OTHER; note = Phosphorodiamidate morpholino backbone
cgacaacccctctccccacagccac

SEQ ID NO: 109 - DNA, 25 bp, synthetic construct
  source 1..25: mol_type = other DNA
  modified_base 1: mod_base = OTHER; note = Sarcosine attached via phosphorodiamidate to nucleotide
  modified_base 1..25: mod_base = OTHER; note = Phosphorodiamidate morpholino backbone
acccctctccccacagccactcacc

SEQ ID NO: 110 - DNA, 25 bp, synthetic construct
  source 1..25: mol_type = other DNA
  modified_base 1: mod_base = OTHER; note = Sarcosine attached via phosphorodiamidate to nucleotide
  modified_base 1..25: mod_base = OTHER; note = Phosphorodiamidate morpholino backbone
tctccccacagccactcacctgccc

SEQ ID NO: 111 - RNA, 20 nt, synthetic construct
  source 1..20: mol_type = other RNA
  modified_base 1: mod_base = OTHER; note = 2'-O-methoxyethyl 5-methylcytosine with phosphorothioate linkage
  modified_base 2: mod_base = OTHER; note = 2'-O-methoxyethyl modified nucleotide with phosphorothioate linkage
  modified_base 3: mod_base = OTHER; note = 2'-O-methoxyethyl modified nucleotide with phosphorothioate linkage
  modified_base 4: mod_base = OTHER; note = 2'-O-methoxyethyl modified thymine with phosphorothioate linkage
  modified_base 5: mod_base = OTHER; note = 2'-O-methoxyethyl modified nucleotide with phosphorothioate linkage
  modified_base 6: mod_base = OTHER; note = 2'-O-methoxyethyl 5-methylcytosine with phosphorothioate linkage
  modified_base 7: mod_base = OTHER; note = 2'-O-methoxyethyl 5-methylcytosine with phosphorothioate linkage
  modified_base 8: mod_base = OTHER; note = 2'-O-methoxyethyl modified nucleotide with phosphorothioate linkage
  modified_base 9: mod_base = OTHER; note = 2'-O-methoxyethyl modified nucleotide with phosphorothioate linkage
  modified_base 10: mod_base = OTHER; note = 2'-O-methoxyethyl modified nucleotide with phosphorothioate linkage
  modified_base 11: mod_base = OTHER; note = 2'-O-methoxyethyl modified nucleotide with phosphorothioate linkage
  modified_base 12: mod_base = OTHER; note = 2'-O-methoxyethyl modified thymine with phosphorothioate linkage
  modified_base 13: mod_base = OTHER; note = 2'-O-methoxyethyl 5-methylcytosine with phosphorothioate linkage
  modified_base 14: mod_base = OTHER; note = 2'-O-methoxyethyl 5-methylcytosine with phosphorothioate linkage
  modified_base 15: mod_base = OTHER; note = 2'-O-methoxyethyl 5-methylcytosine with phosphorothioate linkage
  modified_base 16: mod_base = OTHER; note = 2'-O-methoxyethyl modified nucleotide with phosphorothioate linkage
  modified_base 17: mod_base = OTHER; note = 2'-O-methoxyethyl modified thymine with phosphorothioate linkage
  modified_base 18: mod_base = OTHER; note = 2'-O-methoxyethyl 5-methylcytosine with phosphorothioate linkage
  modified_base 19: mod_base = OTHER; note = 2'-O-methoxyethyl 5-methylcytosine with phosphorothioate linkage
  modified_base 20: mod_base = OTHER; note = 2'-O-methoxyethyl 5-methylcytosine
cagtaccagggtcccatccc

SEQ ID NO: 112 - RNA, 20 nt, synthetic construct
  source 1..20: mol_type = other RNA
  modified_base 1: mod_base = OTHER; note = 2'-O-methoxyethyl 5-methylcytosine with phosphorothioate linkage
  modified_base 2: mod_base = OTHER; note = 2'-O-methoxyethyl 5-methylcytosine with phosphorothioate linkage
  modified_base 3: mod_base = OTHER; note = 2'-O-methoxyethyl modified nucleotide with phosphorothioate linkage
  modified_base 4: mod_base = OTHER; note = 2'-O-methoxyethyl modified nucleotide with phosphorothioate linkage
  modified_base 5: mod_base = OTHER; note = 2'-O-methoxyethyl modified nucleotide with phosphorothioate linkage
  modified_base 6: mod_base = OTHER; note = 2'-O-methoxyethyl modified nucleotide with phosphorothioate linkage
  modified_base 7: mod_base = OTHER; note = 2'-O-methoxyethyl modified thymine with phosphorothioate linkage
  modified_base 8: mod_base = OTHER; note = 2'-O-methoxyethyl 5-methylcytosine with phosphorothioate linkage
  modified_base 9: mod_base = OTHER; note = 2'-O-methoxyethyl 5-methylcytosine with phosphorothioate linkage
  modified_base 10: mod_base = OTHER; note = 2'-O-methoxyethyl 5-methylcytosine with phosphorothioate linkage
  modified_base 11: mod_base = OTHER; note = 2'-O-methoxyethyl modified nucleotide with phosphorothioate linkage
  modified_base 12: mod_base = OTHER; note = 2'-O-methoxyethyl modified thymine with phosphorothioate linkage
  modified_base 13: mod_base = OTHER; note = 2'-O-methoxyethyl 5-methylcytosine with phosphorothioate linkage
  modified_base 14: mod_base = OTHER; note = 2'-O-methoxyethyl 5-methylcytosine with phosphorothioate linkage
  modified_base 15: mod_base = OTHER; note = 2'-O-methoxyethyl 5-methylcytosine with phosphorothioate linkage
  modified_base 16: mod_base = OTHER; note = 2'-O-methoxyethyl modified nucleotide with phosphorothioate linkage
  modified_base 17: mod_base = OTHER; note = 2'-O-methoxyethyl modified nucleotide with phosphorothioate linkage
  modified_base 18: mod_base = OTHER; note = 2'-O-methoxyethyl 5-methylcytosine with phosphorothioate linkage
  modified_base 19: mod_base = OTHER; note = 2'-O-methoxyethyl 5-methylcytosine with phosphorothioate linkage
  modified_base 20: mod_base = OTHER; note = 2'-O-methoxyethyl 5-methylcytosine
ccagggtcccatcccagccc

SEQ ID NO: 113 - RNA, 20 nt, synthetic construct
  source 1..20: mol_type = other RNA
  modified_base 1: mod_base = OTHER; note = 2'-O-methoxyethyl modified nucleotide with phosphorothioate linkage
  modified_base 2: mod_base = OTHER; note = 2'-O-methoxyethyl modified thymine with phosphorothioate linkage
  modified_base 3: mod_base = OTHER; note = 2'-O-methoxyethyl 5-methylcytosine with phosphorothioate linkage
  modified_base 4: mod_base = OTHER; note = 2'-O-methoxyethyl 5-methylcytosine with phosphorothioate linkage
  modified_base 5: mod_base = OTHER; note = 2'-O-methoxyethyl 5-methylcytosine with phosphorothioate linkage
  modified_base 6: mod_base = OTHER; note = 2'-O-methoxyethyl modified nucleotide with phosphorothioate linkage
  modified_base 7: mod_base = OTHER; note = 2'-O-methoxyethyl modified thymine with phosphorothioate linkage
  modified_base 8: mod_base = OTHER; note = 2'-O-methoxyethyl 5-methylcytosine with phosphorothioate linkage
  modified_base 9: mod_base = OTHER; note = 2'-O-methoxyethyl 5-methylcytosine with phosphorothioate linkage
  modified_base 10: mod_base = OTHER; note = 2'-O-methoxyethyl 5-methylcytosine with phosphorothioate linkage
  modified_base 11: mod_base = OTHER; note = 2'-O-methoxyethyl modified nucleotide with phosphorothioate linkage
  modified_base 12: mod_base = OTHER; note = 2'-O-methoxyethyl modified nucleotide with phosphorothioate linkage
  modified_base 13: mod_base = OTHER; note = 2'-O-methoxyethyl 5-methylcytosine with phosphorothioate linkage
  modified_base 14: mod_base = OTHER; note = 2'-O-methoxyethyl 5-methylcytosine with phosphorothioate linkage
  modified_base 15: mod_base = OTHER; note = 2'-O-methoxyethyl 5-methylcytosine with phosphorothioate linkage
  modified_base 16: mod_base = OTHER; note = 2'-O-methoxyethyl modified thymine with phosphorothioate linkage
  modified_base 17: mod_base = OTHER; note = 2'-O-methoxyethyl modified nucleotide with phosphorothioate linkage
  modified_base 18: mod_base = OTHER; note = 2'-O-methoxyethyl 5-methylcytosine with phosphorothioate linkage
  modified_base 19: mod_base = OTHER; note = 2'-O-methoxyethyl 5-methylcytosine with phosphorothioate linkage
  modified_base 20: mod_base = OTHER; note = 2'-O-methoxyethyl 5-methylcytosine
gtcccatcccagccctgccc

SEQ ID NO: 114 - RNA, 20 nt, synthetic construct
  source 1..20: mol_type = other RNA
  modified_base 1: mod_base = OTHER; note = 2'-O-methoxyethyl modified nucleotide with phosphorothioate linkage
  modified_base 2: mod_base = OTHER; note = 2'-O-methoxyethyl modified thymine with phosphorothioate linkage
  modified_base 3: mod_base = OTHER; note = 2'-O-methoxyethyl 5-methylcytosine with phosphorothioate linkage
  modified_base 4: mod_base = OTHER; note = 2'-O-methoxyethyl 5-methylcytosine with phosphorothioate linkage
  modified_base 5: mod_base = OTHER; note = 2'-O-methoxyethyl 5-methylcytosine with phosphorothioate linkage
  modified_base 6: mod_base = OTHER; note = 2'-O-methoxyethyl modified nucleotide with phosphorothioate linkage
  modified_base 7: mod_base = OTHER; note = 2'-O-methoxyethyl modified nucleotide with phosphorothioate linkage
  modified_base 8: mod_base = OTHER; note = 2'-O-methoxyethyl 5-methylcytosine with phosphorothioate linkage
  modified_base 9: mod_base = OTHER; note = 2'-O-methoxyethyl 5-methylcytosine with phosphorothioate linkage
  modified_base 10: mod_base = OTHER; note = 2'-O-methoxyethyl 5-methylcytosine with phosphorothioate linkage
  modified_base 11: mod_base = OTHER; note = 2'-O-methoxyethyl modified thymine with phosphorothioate linkage
  modified_base 12: mod_base = OTHER; note = 2'-O-methoxyethyl modified nucleotide with phosphorothioate linkage
  modified_base 13: mod_base = OTHER; note = 2'-O-methoxyethyl 5-methylcytosine with phosphorothioate linkage
  modified_base 14: mod_base = OTHER; note = 2'-O-methoxyethyl 5-methylcytosine with phosphorothioate linkage
  modified_base 15: mod_base = OTHER; note = 2'-O-methoxyethyl 5-methylcytosine with phosphorothioate linkage
  modified_base 16: mod_base = OTHER; note = 2'-O-methoxyethyl modified thymine with phosphorothioate linkage
  modified_base 17: mod_base = OTHER; note = 2'-O-methoxyethyl modified nucleotide with phosphorothioate linkage
  modified_base 18: mod_base = OTHER; note = 2'-O-methoxyethyl 5-methylcytosine with phosphorothioate linkage
  modified_base 19: mod_base = OTHER; note = 2'-O-methoxyethyl modified nucleotide with phosphorothioate linkage
  modified_base 20: mod_base = OTHER; note = 2'-O-methoxyethyl modified nucleotide
atcccagccctgccctgcag

SEQ ID NO: 115 - RNA, 20 nt, synthetic construct
  source 1..20: mol_type = other RNA
  modified_base 1: mod_base = OTHER; note = 2'-O-methoxyethyl modified nucleotide with phosphorothioate linkage
  modified_base 2: mod_base = OTHER; note = 2'-O-methoxyethyl modified nucleotide with phosphorothioate linkage
  modified_base 3: mod_base = OTHER; note = 2'-O-methoxyethyl 5-methylcytosine with phosphorothioate linkage
  modified_base 4: mod_base = OTHER; note = 2'-O-methoxyethyl 5-methylcytosine with phosphorothioate linkage
  modified_base 5: mod_base = OTHER; note = 2'-O-methoxyethyl 5-methylcytosine with phosphorothioate linkage
  modified_base 6: mod_base = OTHER; note = 2'-O-methoxyethyl modified thymine with phosphorothioate linkage
  modified_base 7: mod_base = OTHER; note = 2'-O-methoxyethyl modified nucleotide with phosphorothioate linkage
  modified_base 8: mod_base = OTHER; note = 2'-O-methoxyethyl 5-methylcytosine with phosphorothioate linkage
  modified_base 9: mod_base = OTHER; note = 2'-O-methoxyethyl 5-methylcytosine with phosphorothioate linkage
  modified_base 10: mod_base = OTHER; note = 2'-O-methoxyethyl 5-methylcytosine with phosphorothioate linkage
  modified_base 11: mod_base = OTHER; note = 2'-O-methoxyethyl modified thymine with phosphorothioate linkage
  modified_base 12: mod_base = OTHER; note = 2'-O-methoxyethyl modified nucleotide with phosphorothioate linkage
  modified_base 13: mod_base = OTHER; note = 2'-O-methoxyethyl 5-methylcytosine with phosphorothioate linkage
  modified_base 14: mod_base = OTHER; note = 2'-O-methoxyethyl modified nucleotide with phosphorothioate linkage
  modified_base 15: mod_base = OTHER; note = 2'-O-methoxyethyl modified nucleotide with phosphorothioate linkage
  modified_base 16: mod_base = OTHER; note = 2'-O-methoxyethyl modified thymine with phosphorothioate linkage
  modified_base 17: mod_base = OTHER; note = 2'-O-methoxyethyl modified nucleotide with phosphorothioate linkage
  modified_base 18: mod_base = OTHER; note = 2'-O-methoxyethyl 5-methylcytosine with phosphorothioate linkage
  modified_base 19: mod_base = OTHER; note = 2'-O-methoxyethyl 5-methylcytosine with phosphorothioate linkage
  modified_base 20: mod_base = OTHER; note = 2'-O-methoxyethyl 5-methylcytosine
agccctgccctgcagtaccc

SEQ ID NO: 116 - RNA, 20 nt, synthetic construct
  source 1..20: mol_type = other RNA
  modified_base 1: mod_base = OTHER; note = 2'-O-methoxyethyl modified thymine with phosphorothioate linkage
  modified_base 2: mod_base = OTHER; note = 2'-O-methoxyethyl modified nucleotide with phosphorothioate linkage
  modified_base 3: mod_base = OTHER; note = 2'-O-methoxyethyl 5-methylcytosine with phosphorothioate linkage
  modified_base 4: mod_base = OTHER; note = 2'-O-methoxyethyl 5-methylcytosine with phosphorothioate linkage
  modified_base 5: mod_base = OTHER; note = 2'-O-methoxyethyl 5-methylcytosine with phosphorothioate linkage
  modified_base 6: mod_base = OTHER; note = 2'-O-methoxyethyl modified thymine with phosphorothioate linkage
  modified_base 7: mod_base = OTHER; note = 2'-O-methoxyethyl modified nucleotide with phosphorothioate linkage
  modified_base 8: mod_base = OTHER; note = 2'-O-methoxyethyl 5-methylcytosine with phosphorothioate linkage
  modified_base 9: mod_base = OTHER; note = 2'-O-methoxyethyl modified nucleotide with phosphorothioate linkage
  modified_base 10: mod_base = OTHER; note = 2'-O-methoxyethyl modified nucleotide with phosphorothioate linkage
  modified_base 11: mod_base = OTHER; note = 2'-O-methoxyethyl modified thymine with phosphorothioate linkage
  modified_base 12: mod_base = OTHER; note = 2'-O-methoxyethyl modified nucleotide with phosphorothioate linkage
  modified_base 13: mod_base = OTHER; note = 2'-O-methoxyethyl 5-methylcytosine with phosphorothioate linkage
  modified_base 14: mod_base = OTHER; note = 2'-O-methoxyethyl 5-methylcytosine with phosphorothioate linkage
  modified_base 15: mod_base = OTHER; note = 2'-O-methoxyethyl 5-methylcytosine with phosphorothioate linkage
  modified_base 16: mod_base = OTHER; note = 2'-O-methoxyethyl modified nucleotide with phosphorothioate linkage
  modified_base 17: mod_base = OTHER; note = 2'-O-methoxyethyl modified thymine with phosphorothioate linkage
  modified_base 18: mod_base = OTHER; note = 2'-O-methoxyethyl modified nucleotide with phosphorothioate linkage
  modified_base 19: mod_base = OTHER; note = 2'-O-methoxyethyl modified nucleotide with phosphorothioate linkage
  modified_base 20: mod_base = OTHER; note = 2'-O-methoxyethyl modified nucleotide
tgccctgcagtacccatgaa

SEQ ID NO: 117 - RNA, 20 nt, synthetic construct
  source 1..20: mol_type = other RNA
  modified_base 1: mod_base = OTHER; note = 2'-O-methoxyethyl modified thymine with phosphorothioate linkage
  modified_base 2: mod_base = OTHER; note = 2'-O-methoxyethyl modified nucleotide with phosphorothioate linkage
  modified_base 3: mod_base = OTHER; note = 2'-O-methoxyethyl 5-methylcytosine with phosphorothioate linkage
  modified_base 4: mod_base = OTHER; note = 2'-O-methoxyethyl modified nucleotide with phosphorothioate linkage
  modified_base 5: mod_base = OTHER; note = 2'-O-methoxyethyl modified nucleotide with phosphorothioate linkage
  modified_base 6: mod_base = OTHER; note = 2'-O-methoxyethyl modified thymine with phosphorothioate linkage
  modified_base 7: mod_base = OTHER; note = 2'-O-methoxyethyl modified nucleotide with phosphorothioate linkage
  modified_base 8: mod_base = OTHER; note = 2'-O-methoxyethyl 5-methylcytosine with phosphorothioate linkage
  modified_base 9: mod_base = OTHER; note = 2'-O-methoxyethyl 5-methylcytosine with phosphorothioate linkage
  modified_base 10: mod_base = OTHER; note = 2'-O-methoxyethyl 5-methylcytosine with phosphorothioate linkage
  modified_base 11: mod_base = OTHER; note = 2'-O-methoxyethyl modified nucleotide with phosphorothioate linkage
  modified_base 12: mod_base = OTHER; note = 2'-O-methoxyethyl modified thymine with phosphorothioate linkage
  modified_base 13: mod_base = OTHER; note = 2'-O-methoxyethyl modified nucleotide with phosphorothioate linkage
  modified_base 14: mod_base = OTHER; note = 2'-O-methoxyethyl modified nucleotide with phosphorothioate linkage
  modified_base 15: mod_base = OTHER; note = 2'-O-methoxyethyl modified nucleotide with phosphorothioate linkage
  modified_base 16: mod_base = OTHER; note = 2'-O-methoxyethyl 5-methylcytosine with phosphorothioate linkage
  modified_base 17: mod_base = OTHER; note = 2'-O-methoxyethyl modified thymine with phosphorothioate linkage
  modified_base 18: mod_base = OTHER; note = 2'-O-methoxyethyl modified thymine with phosphorothioate linkage
  modified_base 19: mod_base = OTHER; note = 2'-O-methoxyethyl 5-methylcytosine with phosphorothioate linkage
  modified_base 20: mod_base = OTHER; note = 2'-O-methoxyethyl 5-methylcytosine
tgcagtacccatgaacttcc

SEQ ID NO: 118 - RNA, 20 nt, synthetic construct
  source 1..20: mol_type = other RNA
  modified_base 1: mod_base = OTHER; note = 2'-O-methoxyethyl modified thymine with phosphorothioate linkage
  modified_base 2: mod_base = OTHER; note = 2'-O-methoxyethyl modified nucleotide with phosphorothioate linkage
  modified_base 3: mod_base = OTHER; note = 2'-O-methoxyethyl 5-methylcytosine with phosphorothioate linkage
  modified_base 4: mod_base = OTHER; note = 2'-O-methoxyethyl 5-methylcytosine with phosphorothioate linkage
  modified_base 5: mod_base = OTHER; note = 2'-O-methoxyethyl 5-methylcytosine with phosphorothioate linkage
  modified_base 6: mod_base = OTHER; note = 2'-O-methoxyethyl modified nucleotide with phosphorothioate linkage
  modified_base 7: mod_base = OTHER; note = 2'-O-methoxyethyl modified thymine with phosphorothioate linkage
  modified_base 8: mod_base = OTHER; note = 2'-O-methoxyethyl modified nucleotide with phosphorothioate linkage
  modified_base 9: mod_base = OTHER; note = 2'-O-methoxyethyl modified nucleotide with phosphorothioate linkage
  modified_base 10: mod_base = OTHER; note = 2'-O-methoxyethyl modified nucleotide with phosphorothioate linkage
  modified_base 11: mod_base = OTHER; note = 2'-O-methoxyethyl 5-methylcytosine with phosphorothioate linkage
  modified_base 12: mod_base = OTHER; note = 2'-O-methoxyethyl modified thymine with phosphorothioate linkage
  modified_base 13: mod_base = OTHER; note = 2'-O-methoxyethyl modified thymine with phosphorothioate linkage
  modified_base 14: mod_base = OTHER; note = 2'-O-methoxyethyl 5-methylcytosine with phosphorothioate linkage
  modified_base 15: mod_base = OTHER; note = 2'-O-methoxyethyl 5-methylcytosine with phosphorothioate linkage
  modified_base 16: mod_base = OTHER; note = 2'-O-methoxyethyl 5-methylcytosine with phosphorothioate linkage
  modified_base 17: mod_base = OTHER; note = 2'-O-methoxyethyl modified thymine with phosphorothioate linkage
  modified_base 18: mod_base = OTHER; note = 2'-O-methoxyethyl modified thymine with phosphorothioate linkage
  modified_base 19: mod_base = OTHER; note = 2'-O-methoxyethyl modified nucleotide with phosphorothioate linkage
  modified_base 20: mod_base = OTHER; note = 2'-O-methoxyethyl 5-methylcytosine
tacccatgaacttcccttgc

SEQ ID NO: 119 - RNA, 20 nt, synthetic construct
  source 1..20: mol_type = other RNA
  modified_base 1: mod_base = OTHER; note = 2'-O-methoxyethyl modified nucleotide with phosphorothioate linkage
  modified_base 2: mod_base = OTHER; note = 2'-O-methoxyethyl modified thymine with phosphorothioate linkage
  modified_base 3: mod_base = OTHER; note = 2'-O-methoxyethyl modified nucleotide with phosphorothioate linkage
  modified_base 4: mod_base = OTHER; note = 2'-O-methoxyethyl modified nucleotide with phosphorothioate linkage
  modified_base 5: mod_base = OTHER; note = 2'-O-methoxyethyl modified nucleotide with phosphorothioate linkage
  modified_base 6: mod_base = OTHER; note = 2'-O-methoxyethyl 5-methylcytosine with phosphorothioate linkage
  modified_base 7: mod_base = OTHER; note = 2'-O-methoxyethyl modified thymine with phosphorothioate linkage
  modified_base 8: mod_base = OTHER; note = 2'-O-methoxyethyl modified thymine with phosphorothioate linkage
  modified_base 9: mod_base = OTHER; note = 2'-O-methoxyethyl 5-methylcytosine with phosphorothioate linkage
  modified_base 10: mod_base = OTHER; note = 2'-O-methoxyethyl 5-methylcytosine with phosphorothioate linkage
  modified_base 11: mod_base = OTHER; note = 2'-O-methoxyethyl 5-methylcytosine with phosphorothioate linkage
  modified_base 12: mod_base = OTHER; note = 2'-O-methoxyethyl modified thymine with phosphorothioate linkage
  modified_base 13: mod_base = OTHER; note = 2'-O-methoxyethyl modified thymine with phosphorothioate linkage
  modified_base 14: mod_base = OTHER; note = 2'-O-methoxyethyl modified nucleotide with phosphorothioate linkage
  modified_base 15: mod_base = OTHER; note = 2'-O-methoxyethyl 5-methylcytosine with phosphorothioate linkage
  modified_base 16: mod_base = OTHER; note = 2'-O-methoxyethyl modified nucleotide with phosphorothioate linkage
  modified_base 17: mod_base = OTHER; note = 2'-O-methoxyethyl modified nucleotide with phosphorothioate linkage
  modified_base 18: mod_base = OTHER; note = 2'-O-methoxyethyl 5-methylcytosine with phosphorothioate linkage
  modified_base 19: mod_base = OTHER; note = 2'-O-methoxyethyl 5-methylcytosine with phosphorothioate linkage
  modified_base 20: mod_base = OTHER; note = 2'-O-methoxyethyl modified nucleotide
atgaacttcccttgcggcca

SEQ ID NO: 120 - RNA, 20 nt, synthetic construct
  source 1..20: mol_type = other RNA
  modified_base 1: mod_base = OTHER; note = 2'-O-methoxyethyl 5-methylcytosine with phosphorothioate linkage
  modified_base 2: mod_base = OTHER; note = 2'-O-methoxyethyl modified thymine with phosphorothioate linkage
  modified_base 3: mod_base = OTHER; note = 2'-O-methoxyethyl modified thymine with phosphorothioate linkage
  modified_base 4: mod_base = OTHER; note = 2'-O-methoxyethyl 5-methylcytosine with phosphorothioate linkage
  modified_base 5: mod_base = OTHER; note = 2'-O-methoxyethyl 5-methylcytosine with phosphorothioate linkage
  modified_base 6: mod_base = OTHER; note = 2'-O-methoxyethyl 5-methylcytosine with phosphorothioate linkage
  modified_base 7: mod_base = OTHER; note = 2'-O-methoxyethyl modified thymine with phosphorothioate linkage
  modified_base 8: mod_base = OTHER; note = 2'-O-methoxyethyl modified thymine with phosphorothioate linkage
  modified_base 9: mod_base = OTHER; note = 2'-O-methoxyethyl modified nucleotide with phosphorothioate linkage
  modified_base 10: mod_base = OTHER; note = 2'-O-methoxyethyl 5-methylcytosine with phosphorothioate linkage
  modified_base 11: mod_base = OTHER; note = 2'-O-methoxyethyl modified nucleotide with phosphorothioate linkage
  modified_base 12: mod_base = OTHER; note = 2'-O-methoxyethyl modified nucleotide with phosphorothioate linkage
  modified_base 13: mod_base = OTHER; note = 2'-O-methoxyethyl 5-methylcytosine with phosphorothioate linkage
  modified_base 14: mod_base = OTHER; note = 2'-O-methoxyethyl 5-methylcytosine with phosphorothioate linkage
  modified_base 15: mod_base = OTHER; note = 2'-O-methoxyethyl modified nucleotide with phosphorothioate linkage
  modified_base 16: mod_base = OTHER; note = 2'-O-methoxyethyl 5-methylcytosine with phosphorothioate linkage
  modified_base 17: mod_base = OTHER; note = 2'-O-methoxyethyl modified thymine with phosphorothioate linkage
  modified_base 18: mod_base = OTHER; note = 2'-O-methoxyethyl modified thymine with phosphorothioate linkage
  modified_base 19: mod_base = OTHER; note = 2'-O-methoxyethyl 5-methylcytosine with phosphorothioate linkage
  modified_base 20: mod_base = OTHER; note = 2'-O-methoxyethyl modified thymine
cttcccttgcggccacttct

SEQ ID NO: 121 - RNA, 20 nt, synthetic construct
  source 1..20: mol_type = other RNA
  modified_base 1: mod_base = OTHER; note = 2'-O-methoxyethyl 5-methylcytosine with phosphorothioate linkage
  modified_base 2: mod_base = OTHER; note = 2'-O-methoxyethyl modified thymine with phosphorothioate linkage
  modified_base 3: mod_base = OTHER; note = 2'-O-methoxyethyl modified thymine with phosphorothioate linkage
  modified_base 4: mod_base = OTHER; note = 2'-O-methoxyethyl modified nucleotide with phosphorothioate linkage
  modified_base 5: mod_base = OTHER; note = 2'-O-methoxyethyl 5-methylcytosine with phosphorothioate linkage
  modified_base 6: mod_base = OTHER; note = 2'-O-methoxyethyl modified nucleotide with phosphorothioate linkage
  modified_base 7: mod_base = OTHER; note = 2'-O-methoxyethyl modified nucleotide with phosphorothioate linkage
  modified_base 8: mod_base = OTHER; note = 2'-O-methoxyethyl 5-methylcytosine with phosphorothioate linkage
  modified_base 9: mod_base = OTHER; note = 2'-O-methoxyethyl 5-methylcytosine with phosphorothioate linkage
  modified_base 10: mod_base = OTHER; note = 2'-O-methoxyethyl modified nucleotide with phosphorothioate linkage
  modified_base 11: mod_base = OTHER; note = 2'-O-methoxyethyl 5-methylcytosine with phosphorothioate linkage
  modified_base 12: mod_base = OTHER; note = 2'-O-methoxyethyl modified thymine with phosphorothioate linkage
  modified_base 13: mod_base = OTHER; note = 2'-O-methoxyethyl modified thymine with phosphorothioate linkage
  modified_base 14: mod_base = OTHER; note = 2'-O-methoxyethyl 5-methylcytosine with phosphorothioate linkage
  modified_base 15: mod_base = OTHER; note = 2'-O-methoxyethyl modified thymine with phosphorothioate linkage
  modified_base 16: mod_base = OTHER; note = 2'-O-methoxyethyl modified nucleotide with phosphorothioate linkage
  modified_base 17: mod_base = OTHER; note = 2'-O-methoxyethyl modified nucleotide with phosphorothioate linkage
  modified_base 18: mod_base = OTHER; note = 2'-O-methoxyethyl modified nucleotide with phosphorothioate linkage
  modified_base 19: mod_base = OTHER; note = 2'-O-methoxyethyl modified nucleotide with phosphorothioate linkage
  modified_base 20: mod_base = OTHER; note = 2'-O-methoxyethyl 5-methylcytosine
cttgcggccacttctgaagc

SEQ ID NO: 122 - RNA, 20 nt, synthetic construct
  source 1..20: mol_type = other RNA
  modified_base 1: mod_base = OTHER; note = 2'-O-methoxyethyl modified nucleotide with phosphorothioate linkage
  modified_base 2: mod_base = OTHER; note = 2'-O-methoxyethyl modified nucleotide with phosphorothioate linkage
  modified_base 3: mod_base = OTHER; note = 2'-O-methoxyethyl 5-methylcytosine with phosphorothioate linkage
  modified_base 4: mod_base = OTHER; note = 2'-O-methoxyethyl 5-methylcytosine with phosphorothioate linkage
  modified_base 5: mod_base = OTHER; note = 2'-O-methoxyethyl modified nucleotide with phosphorothioate linkage
  modified_base 6: mod_base = OTHER; note = 2'-O-methoxyethyl 5-methylcytosine with phosphorothioate linkage
  modified_base 7: mod_base = OTHER; note = 2'-O-methoxyethyl modified thymine with phosphorothioate linkage
  modified_base 8: mod_base = OTHER; note = 2'-O-methoxyethyl modified thymine with phosphorothioate linkage
  modified_base 9: mod_base = OTHER; note = 2'-O-methoxyethyl 5-methylcytosine with phosphorothioate linkage
  modified_base 10: mod_base = OTHER; note = 2'-O-methoxyethyl modified thymine with phosphorothioate linkage
  modified_base 11: mod_base = OTHER; note = 2'-O-methoxyethyl modified nucleotide with phosphorothioate linkage
  modified_base 12: mod_base = OTHER; note = 2'-O-methoxyethyl modified nucleotide with phosphorothioate linkage
  modified_base 13: mod_base = OTHER; note = 2'-O-methoxyethyl modified nucleotide with phosphorothioate linkage
  modified_base 14: mod_base = OTHER; note = 2'-O-methoxyethyl modified nucleotide with phosphorothioate linkage
  modified_base 15: mod_base = OTHER; note = 2'-O-methoxyethyl 5-methylcytosine with phosphorothioate linkage
  modified_base 16: mod_base = OTHER; note = 2'-O-methoxyethyl 5-methylcytosine with phosphorothioate linkage
  modified_base 17: mod_base = OTHER; note = 2'-O-methoxyethyl modified thymine with phosphorothioate linkage
  modified_base 18: mod_base = OTHER; note = 2'-O-methoxyethyl modified nucleotide with phosphorothioate linkage
  modified_base 19: mod_base = OTHER; note = 2'-O-methoxyethyl modified thymine with phosphorothioate linkage
  modified_base 20: mod_base = OTHER; note = 2'-O-methoxyethyl modified nucleotide
ggccacttctgaagcctgtg

SEQ ID NO: 123 - RNA, 20 nt, synthetic construct
  source 1..20: mol_type = other RNA
  modified_base 1: mod_base = OTHER; note = 2'-O-methoxyethyl 5-methylcytosine with phosphorothioate linkage
  modified_base 2: mod_base = OTHER; note = 2'-O-methoxyethyl modified thymine with phosphorothioate linkage
  modified_base 3: mod_base = OTHER; note = 2'-O-methoxyethyl modified thymine with phosphorothioate linkage
  modified_base 4: mod_base = OTHER; note = 2'-O-methoxyethyl 5-methylcytosine with phosphorothioate linkage
  modified_base 5: mod_base = OTHER; note = 2'-O-methoxyethyl modified thymine with phosphorothioate linkage
  modified_base 6: mod_base = OTHER; note = 2'-O-methoxyethyl modified nucleotide with phosphorothioate linkage
  modified_base 7: mod_base = OTHER; note = 2'-O-methoxyethyl modified nucleotide with phosphorothioate linkage
  modified_base 8: mod_base = OTHER; note = 2'-O-methoxyethyl modified nucleotide with phosphorothioate linkage
  modified_base 9: mod_base = OTHER; note = 2'-O-methoxyethyl modified nucleotide with phosphorothioate linkage
  modified_base 10: mod_base = OTHER; note = 2'-O-methoxyethyl 5-methylcytosine with phosphorothioate linkage
  modified_base 11: mod_base = OTHER; note = 2'-O-methoxyethyl 5-methylcytosine with phosphorothioate linkage
  modified_base 12: mod_base = OTHER; note = 2'-O-methoxyethyl modified thymine with phosphorothioate linkage
  modified_base 13: mod_base = OTHER; note = 2'-O-methoxyethyl modified nucleotide with phosphorothioate linkage
  modified_base 14: mod_base = OTHER; note = 2'-O-methoxyethyl modified thymine with phosphorothioate linkage
  modified_base 15: mod_base = OTHER; note = 2'-O-methoxyethyl modified nucleotide with phosphorothioate linkage
  modified_base 16: mod_base = OTHER; note = 2'-O-methoxyethyl 5-methylcytosine with phosphorothioate linkage
  modified_base 17: mod_base = OTHER; note = 2'-O-methoxyethyl 5-methylcytosine with phosphorothioate linkage
  modified_base 18: mod_base = OTHER; note = 2'-O-methoxyethyl modified thymine with phosphorothioate linkage
  modified_base 19: mod_base = OTHER; note = 2'-O-methoxyethyl 5-methylcytosine with phosphorothioate linkage
  modified_base 20: mod_base = OTHER; note = 2'-O-methoxyethyl modified nucleotide
cttctgaagcctgtgcctca

SEQ ID NO: 124 - RNA, 20 nt, synthetic construct
  source 1..20: mol_type = other RNA
  modified_base 1: mod_base = OTHER; note = 2'-O-methoxyethyl modified nucleotide with phosphorothioate linkage
  modified_base 2: mod_base = OTHER; note = 2'-O-methoxyethyl modified nucleotide with phosphorothioate linkage
  modified_base 3: mod_base = OTHER; note = 2'-O-methoxyethyl modified nucleotide with phosphorothioate linkage
  modified_base 4: mod_base = OTHER; note = 2'-O-methoxyethyl modified nucleotide with phosphorothioate linkage
  modified_base 5: mod_base = OTHER; note = 2'-O-methoxyethyl 5-methylcytosine with phosphorothioate linkage
  modified_base 6: mod_base = OTHER; note = 2'-O-methoxyethyl 5-methylcytosine with phosphorothioate linkage
  modified_base 7: mod_base = OTHER; note = 2'-O-methoxyethyl modified thymine with phosphorothioate linkage
  modified_base 8: mod_base = OTHER; note = 2'-O-methoxyethyl modified nucleotide with phosphorothioate linkage
  modified_base 9: mod_base = OTHER; note = 2'-O-methoxyethyl modified thymine with phosphorothioate linkage
  modified_base 10: mod_base = OTHER; note = 2'-O-methoxyethyl modified nucleotide with phosphorothioate linkage
  modified_base 11: mod_base = OTHER; note = 2'-O-methoxyethyl 5-methylcytosine with phosphorothioate linkage
  modified_base 12: mod_base = OTHER; note = 2'-O-methoxyethyl 5-methylcytosine with phosphorothioate linkage
  modified_base 13: mod_base = OTHER; note = 2'-O-methoxyethyl modified thymine with phosphorothioate linkage
  modified_base 14: mod_base = OTHER; note = 2'-O-methoxyethyl 5-methylcytosine with phosphorothioate linkage
  modified_base 15: mod_base = OTHER; note = 2'-O-methoxyethyl modified nucleotide with phosphorothioate linkage
  modified_base 16: mod_base = OTHER; note = 2'-O-methoxyethyl 5-methylcytosine with phosphorothioate linkage
  modified_base 17: mod_base = OTHER; note = 2'-O-methoxyethyl 5-methylcytosine with phosphorothioate linkage
  modified_base 18: mod_base = OTHER; note = 2'-O-methoxyethyl modified thymine with phosphorothioate linkage
  modified_base 19: mod_base = OTHER; note = 2'-O-methoxyethyl modified nucleotide with phosphorothioate linkage
  modified_base 20: mod_base = OTHER; note = 2'-O-methoxyethyl modified thymine
gaagcctgtgcctcacctgt

SEQ ID NO: 125 - RNA, 20 nt, synthetic construct
  source 1..20: mol_type = other RNA
  modified_base 1: mod_base = OTHER; note = 2'-O-methoxyethyl 5-methylcytosine with phosphorothioate linkage
  modified_base 2: mod_base = OTHER; note = 2'-O-methoxyethyl modified thymine with phosphorothioate linkage
  modified_base 3: mod_base = OTHER; note = 2'-O-methoxyethyl modified nucleotide with phosphorothioate linkage
  modified_base 4: mod_base = OTHER; note = 2'-O-methoxyethyl modified thymine with phosphorothioate linkage
  modified_base 5: mod_base = OTHER; note = 2'-O-methoxyethyl modified nucleotide with phosphorothioate linkage
  modified_base 6: mod_base = OTHER; note = 2'-O-methoxyethyl 5-methylcytosine with phosphorothioate linkage
  modified_base 7: mod_base = OTHER; note = 2'-O-methoxyethyl 5-methylcytosine with phosphorothioate linkage
  modified_base 8: mod_base = OTHER; note = 2'-O-methoxyethyl modified thymine with phosphorothioate linkage
  modified_base 9: mod_base = OTHER; note = 2'-O-methoxyethyl 5-methylcytosine with phosphorothioate linkage
  modified_base 10: mod_base = OTHER; note = 2'-O-methoxyethyl modified nucleotide with phosphorothioate linkage
  modified_base 11: mod_base = OTHER; note = 2'-O-methoxyethyl 5-methylcytosine with phosphorothioate linkage
  modified_base 12: mod_base = OTHER; note = 2'-O-methoxyethyl 5-methylcytosine with phosphorothioate linkage
  modified_base 13: mod_base = OTHER; note = 2'-O-methoxyethyl modified thymine with phosphorothioate linkage
  modified_base 14: mod_base = OTHER; note = 2'-O-methoxyethyl modified nucleotide with phosphorothioate linkage
  modified_base 15: mod_base = OTHER; note = 2'-O-methoxyethyl modified thymine with phosphorothioate linkage
  modified_base 16: mod_base = OTHER; note = 2'-O-methoxyethyl 5-methylcytosine with phosphorothioate linkage
  modified_base 17: mod_base = OTHER; note = 2'-O-methoxyethyl modified nucleotide with phosphorothioate linkage
  modified_base 18: mod_base = OTHER; note = 2'-O-methoxyethyl 5-methylcytosine with phosphorothioate linkage
  modified_base 19: mod_base = OTHER; note = 2'-O-methoxyethyl modified nucleotide with phosphorothioate linkage
  modified_base 20: mod_base = OTHER; note = 2'-O-methoxyethyl modified thymine
ctgtgcctcacctgtcacat

SEQ ID NO: 126 - RNA, 20 nt, synthetic construct
  source 1..20: mol_type = other RNA
  modified_base 1: mod_base = OTHER; note = 2'-O-methoxyethyl 5-methylcytosine with phosphorothioate linkage
  modified_base 2: mod_base = OTHER; note = 2'-O-methoxyethyl 5-methylcytosine with phosphorothioate linkage
  modified_base 3: mod_base = OTHER; note = 2'-O-methoxyethyl modified thymine with phosphorothioate linkage
  modified_base 4: mod_base = OTHER; note = 2'-O-methoxyethyl 5-methylcytosine with phosphorothioate linkage
  modified_base 5: mod_base = OTHER; note = 2'-O-methoxyethyl modified nucleotide with phosphorothioate linkage
  modified_base 6: mod_base = OTHER; note = 2'-O-methoxyethyl 5-methylcytosine with phosphorothioate linkage
  modified_base 7: mod_base = OTHER; note = 2'-O-methoxyethyl 5-methylcytosine with phosphorothioate linkage
  modified_base 8: mod_base = OTHER; note = 2'-O-methoxyethyl modified thymine with phosphorothioate linkage
  modified_base 9: mod_base = OTHER; note = 2'-O-methoxyethyl modified nucleotide with phosphorothioate linkage
  modified_base 10: mod_base = OTHER; note = 2'-O-methoxyethyl modified thymine with phosphorothioate linkage
  modified_base 11: mod_base = OTHER; note = 2'-O-methoxyethyl 5-methylcytosine with phosphorothioate linkage
  modified_base 12: mod_base = OTHER; note = 2'-O-methoxyethyl modified nucleotide with phosphorothioate linkage
  modified_base 13: mod_base = OTHER; note = 2'-O-methoxyethyl 5-methylcytosine with phosphorothioate linkage
  modified_base 14: mod_base = OTHER; note = 2'-O-methoxyethyl modified nucleotide with phosphorothioate linkage
  modified_base 15: mod_base = OTHER; note = 2'-O-methoxyethyl modified thymine with phosphorothioate linkage
  modified_base 16: mod_base = OTHER; note = 2'-O-methoxyethyl modified nucleotide with phosphorothioate linkage
  modified_base 17: mod_base = OTHER; note = 2'-O-methoxyethyl 5-methylcytosine with phosphorothioate linkage
  modified_base 18: mod_base = OTHER; note = 2'-O-methoxyethyl modified nucleotide with phosphorothioate linkage
  modified_base 19: mod_base = OTHER; note = 2'-O-methoxyethyl 5-methylcytosine with phosphorothioate linkage
  modified_base 20: mod_base = OTHER; note = 2'-O-methoxyethyl modified nucleotide
cctcacctgtcacatgcaca

SEQ ID NO: 127 - RNA, 20 nt, synthetic construct
  source 1..20: mol_type = other RNA
  modified_base 1: mod_base = OTHER; note = 2'-O-methoxyethyl 5-methylcytosine with phosphorothioate linkage
  modified_base 2: mod_base = OTHER; note = 2'-O-methoxyethyl 5-methylcytosine with phosphorothioate linkage
  modified_base 3: mod_base = OTHER; note = 2'-O-methoxyethyl modified thymine with phosphorothioate linkage
  modified_base 4: mod_base = OTHER; note = 2'-O-methoxyethyl modified nucleotide with phosphorothioate linkage
  modified_base 5: mod_base = OTHER; note = 2'-O-methoxyethyl modified thymine with phosphorothioate linkage
  modified_base 6: mod_base = OTHER; note = 2'-O-methoxyethyl 5-methylcytosine with phosphorothioate linkage
  modified_base 7: mod_base = OTHER; note = 2'-O-methoxyethyl modified nucleotide with phosphorothioate linkage
  modified_base 8: mod_base = OTHER; note = 2'-O-methoxyethyl 5-methylcytosine with phosphorothioate linkage
  modified_base 9: mod_base = OTHER; note = 2'-O-methoxyethyl modified nucleotide with phosphorothioate linkage
  modified_base 10: mod_base = OTHER; note = 2'-O-methoxyethyl modified thymine with phosphorothioate linkage
  modified_base 11: mod_base = OTHER; note = 2'-O-methoxyethyl modified nucleotide with phosphorothioate linkage
  modified_base 12: mod_base = OTHER; note = 2'-O-methoxyethyl 5-methylcytosine with phosphorothioate linkage
  modified_base 13: mod_base = OTHER; note = 2'-O-methoxyethyl modified nucleotide with phosphorothioate linkage
  modified_base 14: mod_base = OTHER; note = 2'-O-methoxyethyl 5-methylcytosine with phosphorothioate linkage
  modified_base 15: mod_base = OTHER; note = 2'-O-methoxyethyl modified nucleotide with phosphorothioate linkage
  modified_base 16: mod_base = OTHER; note = 2'-O-methoxyethyl modified nucleotide with phosphorothioate linkage
  modified_base 17: mod_base = OTHER; note = 2'-O-methoxyethyl modified nucleotide with phosphorothioate linkage
  modified_base 18: mod_base = OTHER; note = 2'-O-methoxyethyl modified nucleotide with phosphorothioate linkage
  modified_base 19: mod_base = OTHER; note = 2'-O-methoxyethyl modified nucleotide with phosphorothioate linkage
  modified_base 20: mod_base = OTHER; note = 2'-O-methoxyethyl modified nucleotide
cctgtcacatgcacagagag

SEQ ID NO: 128 - RNA, 20 nt, synthetic construct
  source 1..20: mol_type = other RNA
  modified_base 1: mod_base = OTHER; note = 2'-O-methoxyethyl modified nucleotide with phosphorothioate linkage
  modified_base 2: mod_base = OTHER; note = 2'-O-methoxyethyl 5-methylcytosine with phosphorothioate linkage
  modified_base 3: mod_base = OTHER; note = 2'-O-methoxyethyl modified nucleotide with phosphorothioate linkage
  modified_base 4: mod_base = OTHER; note = 2'-O-methoxyethyl 5-methylcytosine with phosphorothioate linkage
  modified_base 5: mod_base = OTHER; note = 2'-O-methoxyethyl modified nucleotide with phosphorothioate linkage
  modified_base 6: mod_base = OTHER; note = 2'-O-methoxyethyl modified nucleotide with phosphorothioate linkage
  modified_base 7: mod_base = OTHER; note = 2'-O-methoxyethyl modified nucleotide with phosphorothioate linkage
  modified_base 8: mod_base = OTHER; note = 2'-O-methoxyethyl modified nucleotide with phosphorothioate linkage
  modified_base 9: mod_base = OTHER; note = 2'-O-methoxyethyl modified nucleotide with phosphorothioate linkage
  modified_base 10: mod_base = OTHER; note = 2'-O-methoxyethyl modified nucleotide with phosphorothioate linkage
  modified_base 11: mod_base = OTHER; note = 2'-O-methoxyethyl 5-methylcytosine with phosphorothioate linkage
  modified_base 12: mod_base = OTHER; note = 2'-O-methoxyethyl modified thymine with phosphorothioate linkage
  modified_base 13: mod_base = OTHER; note = 2'-O-methoxyethyl modified nucleotide with phosphorothioate linkage
  modified_base 14: mod_base = OTHER; note = 2'-O-methoxyethyl modified nucleotide with phosphorothioate linkage
  modified_base 15: mod_base = OTHER; note = 2'-O-methoxyethyl modified nucleotide with phosphorothioate linkage
  modified_base 16: mod_base = OTHER; note = 2'-O-methoxyethyl modified nucleotide with phosphorothioate linkage
  modified_base 17: mod_base = OTHER; note = 2'-O-methoxyethyl modified nucleotide with phosphorothioate linkage
  modified_base 18: mod_base = OTHER; note = 2'-O-methoxyethyl modified nucleotide with phosphorothioate linkage
  modified_base 19: mod_base = OTHER; note = 2'-O-methoxyethyl modified nucleotide with phosphorothioate linkage
  modified_base 20: mod_base = OTHER; note = 2'-O-methoxyethyl modified thymine
gcacagagagctggggagat

SEQ ID NO: 129 - RNA, 20 nt, synthetic construct
  source 1..20: mol_type = other RNA
  modified_base 1: mod_base = OTHER; note = 2'-O-methoxyethyl 5-methylcytosine with phosphorothioate linkage
  modified_base 2: mod_base = OTHER; note = 2'-O-methoxyethyl modified thymine with phosphorothioate linkage
  modified_base 3: mod_base = OTHER; note = 2'-O-methoxyethyl modified nucleotide with phosphorothioate linkage
  modified_base 4: mod_base = OTHER; note = 2'-O-methoxyethyl modified nucleotide with phosphorothioate linkage
  modified_base 5: mod_base = OTHER; note = 2'-O-methoxyethyl modified nucleotide with phosphorothioate linkage
  modified_base 6: mod_base = OTHER; note = 2'-O-methoxyethyl modified nucleotide with phosphorothioate linkage
  modified_base 7: mod_base = OTHER; note = 2'-O-methoxyethyl modified nucleotide with phosphorothioate linkage
  modified_base 8: mod_base = OTHER; note = 2'-O-methoxyethyl modified nucleotide with phosphorothioate linkage
  modified_base 9: mod_base = OTHER; note = 2'-O-methoxyethyl modified nucleotide with phosphorothioate linkage
  modified_base 10: mod_base = OTHER; note = 2'-O-methoxyethyl modified thymine with phosphorothioate linkage
  modified_base 11: mod_base = OTHER; note = 2'-O-methoxyethyl modified thymine with phosphorothioate linkage
  modified_base 12: mod_base = OTHER; note = 2'-O-methoxyethyl modified thymine with phosphorothioate linkage
  modified_base 13: mod_base = OTHER; note = 2'-O-methoxyethyl modified nucleotide with phosphorothioate linkage
  modified_base 14: mod_base = OTHER; note = 2'-O-methoxyethyl modified thymine with phosphorothioate linkage
  modified_base 15: mod_base = OTHER; note = 2'-O-methoxyethyl modified nucleotide with phosphorothioate linkage
  modified_base 16: mod_base = OTHER; note = 2'-O-methoxyethyl modified nucleotide with phosphorothioate linkage
  modified_base 17: mod_base = OTHER; note = 2'-O-methoxyethyl 5-methylcytosine with phosphorothioate linkage
  modified_base 18: mod_base = OTHER; note = 2'-O-methoxyethyl modified thymine with phosphorothioate linkage
  modified_base 19: mod_base = OTHER; note = 2'-O-methoxyethyl modified nucleotide with phosphorothioate linkage
  modified_base 20: mod_base = OTHER; note = 2'-O-methoxyethyl modified thymine
ctggggagatttgtaactgt

SEQ ID NO: 130 - RNA, 20 nt, synthetic construct
  source 1..20: mol_type = other RNA
  modified_base 1: mod_base = OTHER; note = 2'-O-methoxyethyl modified nucleotide with phosphorothioate linkage
  modified_base 2: mod_base = OTHER; note = 2'-O-methoxyethyl modified nucleotide with phosphorothioate linkage
  modified_base 3: mod_base = OTHER; note = 2'-O-methoxyethyl modified nucleotide with phosphorothioate linkage
  modified_base 4: mod_base = OTHER; note = 2'-O-methoxyethyl modified nucleotide with phosphorothioate linkage
  modified_base 5: mod_base = OTHER; note = 2'-O-methoxyethyl modified thymine with phosphorothioate linkage
  modified_base 6: mod_base = OTHER; note = 2'-O-methoxyethyl modified thymine with phosphorothioate linkage
  modified_base 7: mod_base = OTHER; note = 2'-O-methoxyethyl modified thymine with phosphorothioate linkage
  modified_base 8: mod_base = OTHER; note = 2'-O-methoxyethyl modified nucleotide with phosphorothioate linkage
  modified_base 9: mod_base = OTHER; note = 2'-O-methoxyethyl modified thymine with phosphorothioate linkage
  modified_base 10: mod_base = OTHER; note = 2'-O-methoxyethyl modified nucleotide with phosphorothioate linkage
  modified_base 11: mod_base = OTHER; note = 2'-O-methoxyethyl modified nucleotide with phosphorothioate linkage
  modified_base 12: mod_base = OTHER; note = 2'-O-methoxyethyl 5-methylcytosine with phosphorothioate linkage
  modified_base 13: mod_base = OTHER; note = 2'-O-methoxyethyl modified thymine with phosphorothioate linkage
  modified_base 14: mod_base = OTHER; note = 2'-O-methoxyethyl modified nucleotide with phosphorothioate linkage
  modified_base 15: mod_base = OTHER; note = 2'-O-methoxyethyl modified thymine with phosphorothioate linkage
  modified_base 16: mod_base = OTHER; note = 2'-O-methoxyethyl modified nucleotide with phosphorothioate linkage
  modified_base 17: mod_base = OTHER; note = 2'-O-methoxyethyl modified thymine with phosphorothioate linkage
  modified_base 18: mod_base = OTHER; note = 2'-O-methoxyethyl modified thymine with phosphorothioate linkage
  modified_base 19: mod_base = OTHER; note = 2'-O-methoxyethyl modified thymine with phosphorothioate linkage
  modified_base 20: mod_base = OTHER; note = 2'-O-methoxyethyl modified nucleotide
gagatttgtaactgtatttg

SEQ ID NO: 131 - RNA, 20 nt, synthetic construct
  source 1..20: mol_type = other RNA
  modified_base 1: mod_base = OTHER; note = 2'-O-methoxyethyl modified thymine with phosphorothioate linkage
  modified_base 2: mod_base = OTHER; note = 2'-O-methoxyethyl modified thymine with phosphorothioate linkage
  modified_base 3: mod_base = OTHER; note = 2'-O-methoxyethyl modified nucleotide with phosphorothioate linkage
  modified_base 4: mod_base = OTHER; note = 2'-O-methoxyethyl modified thymine with phosphorothioate linkage
  modified_base 5: mod_base = OTHER; note = 2'-O-methoxyethyl modified nucleotide with phosphorothioate linkage
  modified_base 6: mod_base = OTHER; note = 2'-O-methoxyethyl modified nucleotide with phosphorothioate linkage
  modified_base 7: mod_base = OTHER; note = 2'-O-methoxyethyl 5-methylcytosine with phosphorothioate linkage
  modified_base 8: mod_base = OTHER; note = 2'-O-methoxyethyl modified thymine with phosphorothioate linkage
  modified_base 9: mod_base = OTHER; note = 2'-O-methoxyethyl modified nucleotide with phosphorothioate linkage
  modified_base 10: mod_base = OTHER; note = 2'-O-methoxyethyl modified thymine with phosphorothioate linkage
  modified_base 11: mod_base = OTHER; note = 2'-O-methoxyethyl modified nucleotide with phosphorothioate linkage
  modified_base 12: mod_base = OTHER; note = 2'-O-methoxyethyl modified thymine with phosphorothioate linkage
  modified_base 13: mod_base = OTHER; note = 2'-O-methoxyethyl modified thymine with phosphorothioate linkage
  modified_base 14: mod_base = OTHER; note = 2'-O-methoxyethyl modified thymine with phosphorothioate linkage
  modified_base 15: mod_base = OTHER; note = 2'-O-methoxyethyl modified nucleotide with phosphorothioate linkage
  modified_base 16: mod_base = OTHER; note = 2'-O-methoxyethyl modified nucleotide with phosphorothioate linkage
  modified_base 17: mod_base = OTHER; note = 2'-O-methoxyethyl modified thymine with phosphorothioate linkage
  modified_base 18: mod_base = OTHER; note = 2'-O-methoxyethyl modified nucleotide with phosphorothioate linkage
  modified_base 19: mod_base = OTHER; note = 2'-O-methoxyethyl 5-methylcytosine with phosphorothioate linkage
  modified_base 20: mod_base = OTHER; note = 2'-O-methoxyethyl modified thymine
ttgtaactgtatttggtact

SEQ ID NO: 132 - RNA, 20 nt, synthetic construct
  source 1..20: mol_type = other RNA
  modified_base 1: mod_base = OTHER; note = 2'-O-methoxyethyl modified nucleotide with phosphorothioate linkage
  modified_base 2: mod_base = OTHER; note = 2'-O-methoxyethyl 5-methylcytosine with phosphorothioate linkage
  modified_base 3: mod_base = OTHER; note = 2'-O-methoxyethyl modified thymine with phosphorothioate linkage
  modified_base 4: mod_base = OTHER; note = 2'-O-methoxyethyl modified nucleotide with phosphorothioate linkage
  modified_base 5: mod_base = OTHER; note = 2'-O-methoxyethyl modified thymine with phosphorothioate linkage
  modified_base 6: mod_base = OTHER; note = 2'-O-methoxyethyl modified nucleotide with phosphorothioate linkage
  modified_base 7: mod_base = OTHER; note = 2'-O-methoxyethyl modified thymine with phosphorothioate linkage
  modified_base 8: mod_base = OTHER; note = 2'-O-methoxyethyl modified thymine with phosphorothioate linkage
  modified_base 9: mod_base = OTHER; note = 2'-O-methoxyethyl modified thymine with phosphorothioate linkage
  modified_base 10: mod_base = OTHER; note = 2'-O-methoxyethyl modified nucleotide with phosphorothioate linkage
  modified_base 11: mod_base = OTHER; note = 2'-O-methoxyethyl modified nucleotide with phosphorothioate linkage
  modified_base 12: mod_base = OTHER; note = 2'-O-methoxyethyl modified thymine with phosphorothioate linkage
  modified_base 13: mod_base = OTHER; note = 2'-O-methoxyethyl modified nucleotide with phosphorothioate linkage
  modified_base 14: mod_base = OTHER; note = 2'-O-methoxyethyl 5-methylcytosine with phosphorothioate linkage
  modified_base 15: mod_base = OTHER; note = 2'-O-methoxyethyl modified thymine with phosphorothioate linkage
  modified_base 16: mod_base = OTHER; note = 2'-O-methoxyethyl modified thymine with phosphorothioate linkage
  modified_base 17: mod_base = OTHER; note = 2'-O-methoxyethyl 5-methylcytosine with phosphorothioate linkage
  modified_base 18: mod_base = OTHER; note = 2'-O-methoxyethyl 5-methylcytosine with phosphorothioate linkage
  modified_base 19: mod_base = OTHER; note = 2'-O-methoxyethyl modified thymine with phosphorothioate linkage
  modified_base 20: mod_base = OTHER; note = 2'-O-methoxyethyl 5-methylcytosine
actgtatttggtacttcctc

SEQ ID NO: 133 - RNA, 20 nt, synthetic construct
  source 1..20: mol_type = other RNA
  modified_base 1: mod_base = OTHER; note = 2'-O-methoxyethyl modified nucleotide with phosphorothioate linkage
  modified_base 2: mod_base = OTHER; note = 2'-O-methoxyethyl modified thymine with phosphorothioate linkage
  modified_base 3: mod_base = OTHER; note = 2'-O-methoxyethyl modified thymine with phosphorothioate linkage
  modified_base 4: mod_base = OTHER; note = 2'-O-methoxyethyl modified thymine with phosphorothioate linkage
  modified_base 5: mod_base = OTHER; note = 2'-O-methoxyethyl modified nucleotide with phosphorothioate linkage
  modified_base 6: mod_base = OTHER; note = 2'-O-methoxyethyl modified nucleotide with phosphorothioate linkage
  modified_base 7: mod_base = OTHER; note = 2'-O-methoxyethyl modified thymine with phosphorothioate linkage
  modified_base 8: mod_base = OTHER; note = 2'-O-methoxyethyl modified nucleotide with phosphorothioate linkage
  modified_base 9: mod_base = OTHER; note = 2'-O-methoxyethyl 5-methylcytosine with phosphorothioate linkage
  modified_base 10: mod_base = OTHER; note = 2'-O-methoxyethyl modified thymine with phosphorothioate linkage
  modified_base 11: mod_base = OTHER; note = 2'-O-methoxyethyl modified thymine with phosphorothioate linkage
  modified_base 12: mod_base = OTHER; note = 2'-O-methoxyethyl 5-methylcytosine with phosphorothioate linkage
  modified_base 13: mod_base = OTHER; note = 2'-O-methoxyethyl 5-methylcytosine with phosphorothioate linkage
  modified_base 14: mod_base = OTHER; note = 2'-O-methoxyethyl modified thymine with phosphorothioate linkage
  modified_base 15: mod_base = OTHER; note = 2'-O-methoxyethyl 5-methylcytosine with phosphorothioate linkage
  modified_base 16: mod_base = OTHER; note = 2'-O-methoxyethyl modified thymine with phosphorothioate linkage
  modified_base 17: mod_base = OTHER; note = 2'-O-methoxyethyl 5-methylcytosine with phosphorothioate linkage
  modified_base 18: mod_base = OTHER; note = 2'-O-methoxyethyl modified thymine with phosphorothioate linkage
  modified_base 19: mod_base = OTHER; note = 2'-O-methoxyethyl 5-methylcytosine with phosphorothioate linkage
  modified_base 20: mod_base = OTHER; note = 2'-O-methoxyethyl 5-methylcytosine
atttggtacttcctctctcc

SEQ ID NO: 134 - RNA, 20 nt, synthetic construct
  source 1..20: mol_type = other RNA
  modified_base 1: mod_base = OTHER; note = 2'-O-methoxyethyl modified nucleotide with phosphorothioate linkage
  modified_base 2: mod_base = OTHER; note = 2'-O-methoxyethyl modified thymine with phosphorothioate linkage
  modified_base 3: mod_base = OTHER; note = 2'-O-methoxyethyl modified nucleotide with phosphorothioate linkage
  modified_base 4: mod_base = OTHER; note = 2'-O-methoxyethyl 5-methylcytosine with phosphorothioate linkage
  modified_base 5: mod_base = OTHER; note = 2'-O-methoxyethyl modified thymine with phosphorothioate linkage
  modified_base 6: mod_base = OTHER; note = 2'-O-methoxyethyl modified thymine with phosphorothioate linkage
  modified_base 7: mod_base = OTHER; note = 2'-O-methoxyethyl 5-methylcytosine with phosphorothioate linkage
  modified_base 8: mod_base = OTHER; note = 2'-O-methoxyethyl 5-methylcytosine with phosphorothioate linkage
  modified_base 9: mod_base = OTHER; note = 2'-O-methoxyethyl modified thymine with phosphorothioate linkage
  modified_base 10: mod_base = OTHER; note = 2'-O-methoxyethyl 5-methylcytosine with phosphorothioate linkage
  modified_base 11: mod_base = OTHER; note = 2'-O-methoxyethyl modified thymine with phosphorothioate linkage
  modified_base 12: mod_base = OTHER; note = 2'-O-methoxyethyl 5-methylcytosine with phosphorothioate linkage
  modified_base 13: mod_base = OTHER; note = 2'-O-methoxyethyl modified thymine with phosphorothioate linkage
  modified_base 14: mod_base = OTHER; note = 2'-O-methoxyethyl 5-methylcytosine with phosphorothioate linkage
  modified_base 15: mod_base = OTHER; note = 2'-O-methoxyethyl 5-methylcytosine with phosphorothioate linkage
  modified_base 16: mod_base = OTHER; note = 2'-O-methoxyethyl modified nucleotide with phosphorothioate linkage
  modified_base 17: mod_base = OTHER; note = 2'-O-methoxyethyl modified thymine with phosphorothioate linkage
  modified_base 18: mod_base = OTHER; note = 2'-O-methoxyethyl 5-methylcytosine with phosphorothioate linkage
  modified_base 19: mod_base = OTHER; note = 2'-O-methoxyethyl 5-methylcytosine with phosphorothioate linkage
  modified_base 20: mod_base = OTHER; note = 2'-O-methoxyethyl modified nucleotide
gtacttcctctctccatccg

SEQ ID NO: 135 - RNA, 20 nt, synthetic construct
  source 1..20: mol_type = other RNA
  modified_base 1: mod_base = OTHER; note = 2'-O-methoxyethyl modified thymine with phosphorothioate linkage
  modified_base 2: mod_base = OTHER; note = 2'-O-methoxyethyl 5-methylcytosine with phosphorothioate linkage
  modified_base 3: mod_base = OTHER; note = 2'-O-methoxyethyl 5-methylcytosine with phosphorothioate linkage
  modified_base 4: mod_base = OTHER; note = 2'-O-methoxyethyl modified thymine with phosphorothioate linkage
  modified_base 5: mod_base = OTHER; note = 2'-O-methoxyethyl 5-methylcytosine with phosphorothioate linkage
  modified_base 6: mod_base = OTHER; note = 2'-O-methoxyethyl modified thymine with phosphorothioate linkage
  modified_base 7: mod_base = OTHER; note = 2'-O-methoxyethyl 5-methylcytosine with phosphorothioate linkage
  modified_base 8: mod_base = OTHER; note = 2'-O-methoxyethyl modified thymine with phosphorothioate linkage
  modified_base 9: mod_base = OTHER; note = 2'-O-methoxyethyl 5-methylcytosine with phosphorothioate linkage
  modified_base 10: mod_base = OTHER; note = 2'-O-methoxyethyl 5-methylcytosine with phosphorothioate linkage
  modified_base 11: mod_base = OTHER; note = 2'-O-methoxyethyl modified nucleotide with phosphorothioate linkage
  modified_base 12: mod_base = OTHER; note = 2'-O-methoxyethyl modified thymine with phosphorothioate linkage
  modified_base 13: mod_base = OTHER; note = 2'-O-methoxyethyl 5-methylcytosine with phosphorothioate linkage
  modified_base 14: mod_base = OTHER; note = 2'-O-methoxyethyl 5-methylcytosine with phosphorothioate linkage
  modified_base 15: mod_base = OTHER; note = 2'-O-methoxyethyl modified nucleotide with phosphorothioate linkage
  modified_base 16: mod_base = OTHER; note = 2'-O-methoxyethyl modified nucleotide with phosphorothioate linkage
  modified_base 17: mod_base = OTHER; note = 2'-O-methoxyethyl modified nucleotide with phosphorothioate linkage
  modified_base 18: mod_base = OTHER; note = 2'-O-methoxyethyl modified nucleotide with phosphorothioate linkage
  modified_base 19: mod_base = OTHER; note = 2'-O-methoxyethyl modified nucleotide with phosphorothioate linkage
  modified_base 20: mod_base = OTHER; note = 2'-O-methoxyethyl modified nucleotide
tcctctctccatccgaaaga

SEQ ID NO: 136 - RNA, 20 nt, synthetic construct
  source 1..20: mol_type = other RNA
  modified_base 1: mod_base = OTHER; note = 2'-O-methoxyethyl modified nucleotide with phosphorothioate linkage
  modified_base 2: mod_base = OTHER; note = 2'-O-methoxyethyl modified nucleotide with phosphorothioate linkage
  modified_base 3: mod_base = OTHER; note = 2'-O-methoxyethyl modified nucleotide with phosphorothioate linkage
  modified_base 4: mod_base = OTHER; note = 2'-O-methoxyethyl modified nucleotide with phosphorothioate linkage
  modified_base 5: mod_base = OTHER; note = 2'-O-methoxyethyl modified nucleotide with phosphorothioate linkage
  modified_base 6: mod_base = OTHER; note = 2'-O-methoxyethyl modified nucleotide with phosphorothioate linkage
  modified_base 7: mod_base = OTHER; note = 2'-O-methoxyethyl modified nucleotide with phosphorothioate linkage
  modified_base 8: mod_base = OTHER; note = 2'-O-methoxyethyl modified thymine with phosphorothioate linkage
  modified_base 9: mod_base = OTHER; note = 2'-O-methoxyethyl modified nucleotide with phosphorothioate linkage
  modified_base 10: mod_base = OTHER; note = 2'-O-methoxyethyl modified thymine with phosphorothioate linkage
  modified_base 11: mod_base = OTHER; note = 2'-O-methoxyethyl modified nucleotide with phosphorothioate linkage
  modified_base 12: mod_base = OTHER; note = 2'-O-methoxyethyl modified nucleotide with phosphorothioate linkage
  modified_base 13: mod_base = OTHER; note = 2'-O-methoxyethyl modified nucleotide with phosphorothioate linkage
  modified_base 14: mod_base = OTHER; note = 2'-O-methoxyethyl 5-methylcytosine with phosphorothioate linkage
  modified_base 15: mod_base = OTHER; note = 2'-O-methoxyethyl 5-methylcytosine with phosphorothioate linkage
  modified_base 16: mod_base = OTHER; note = 2'-O-methoxyethyl modified nucleotide with phosphorothioate linkage
  modified_base 17: mod_base = OTHER; note = 2'-O-methoxyethyl modified thymine with phosphorothioate linkage
  modified_base 18: mod_base = OTHER; note = 2'-O-methoxyethyl modified thymine with phosphorothioate linkage
  modified_base 19: mod_base = OTHER; note = 2'-O-methoxyethyl modified nucleotide with phosphorothioate linkage
  modified_base 20: mod_base = OTHER; note = 2'-O-methoxyethyl modified thymine
aaagaagtatgaaccattat

SEQ ID NO: 137 - RNA, 20 nt, synthetic construct
  source 1..20: mol_type = other RNA
  modified_base 1: mod_base = OTHER; note = 2'-O-methoxyethyl modified nucleotide with phosphorothioate linkage
  modified_base 2: mod_base = OTHER; note = 2'-O-methoxyethyl modified nucleotide with phosphorothioate linkage
  modified_base 3: mod_base = OTHER; note = 2'-O-methoxyethyl modified thymine with phosphorothioate linkage
  modified_base 4: mod_base = OTHER; note = 2'-O-methoxyethyl modified nucleotide with phosphorothioate linkage
  modified_base 5: mod_base = OTHER; note = 2'-O-methoxyethyl modified thymine with phosphorothioate linkage
  modified_base 6: mod_base = OTHER; note = 2'-O-methoxyethyl modified nucleotide with phosphorothioate linkage
  modified_base 7: mod_base = OTHER; note = 2'-O-methoxyethyl modified nucleotide with phosphorothioate linkage
  modified_base 8: mod_base = OTHER; note = 2'-O-methoxyethyl modified nucleotide with phosphorothioate linkage
  modified_base 9: mod_base = OTHER; note = 2'-O-methoxyethyl 5-methylcytosine with phosphorothioate linkage
  modified_base 10: mod_base = OTHER; note = 2'-O-methoxyethyl 5-methylcytosine with phosphorothioate linkage
  modified_base 11: mod_base = OTHER; note = 2'-O-methoxyethyl modified nucleotide with phosphorothioate linkage
  modified_base 12: mod_base = OTHER; note = 2'-O-methoxyethyl modified thymine with phosphorothioate linkage
  modified_base 13: mod_base = OTHER; note = 2'-O-methoxyethyl modified thymine with phosphorothioate linkage
  modified_base 14: mod_base = OTHER; note = 2'-O-methoxyethyl modified nucleotide with phosphorothioate linkage
  modified_base 15: mod_base = OTHER; note = 2'-O-methoxyethyl modified thymine with phosphorothioate linkage
  modified_base 16: mod_base = OTHER; note = 2'-O-methoxyethyl 5-methylcytosine with phosphorothioate linkage
  modified_base 17: mod_base = OTHER; note = 2'-O-methoxyethyl 5-methylcytosine with phosphorothioate linkage
  modified_base 18: mod_base = OTHER; note = 2'-O-methoxyethyl 5-methylcytosine with phosphorothioate linkage
  modified_base 19: mod_base = OTHER; note = 2'-O-methoxyethyl modified thymine with phosphorothioate linkage
  modified_base 20: mod_base = OTHER; note = 2'-O-methoxyethyl 5-methylcytosine
agtatgaaccattatccctc

SEQ ID NO: 138 - RNA, 20 nt, synthetic construct
  source 1..20: mol_type = other RNA
  modified_base 1: mod_base = OTHER; note = 2'-O-methoxyethyl modified nucleotide with phosphorothioate linkage
  modified_base 2: mod_base = OTHER; note = 2'-O-methoxyethyl modified nucleotide with phosphorothioate linkage
  modified_base 3: mod_base = OTHER; note = 2'-O-methoxyethyl modified nucleotide with phosphorothioate linkage
  modified_base 4: mod_base = OTHER; note = 2'-O-methoxyethyl 5-methylcytosine with phosphorothioate linkage
  modified_base 5: mod_base = OTHER; note = 2'-O-methoxyethyl 5-methylcytosine with phosphorothioate linkage
  modified_base 6: mod_base = OTHER; note = 2'-O-methoxyethyl modified nucleotide with phosphorothioate linkage
  modified_base 7: mod_base = OTHER; note = 2'-O-methoxyethyl modified thymine with phosphorothioate linkage
  modified_base 8: mod_base = OTHER; note = 2'-O-methoxyethyl modified thymine with phosphorothioate linkage
  modified_base 9: mod_base = OTHER; note = 2'-O-methoxyethyl modified nucleotide with phosphorothioate linkage
  modified_base 10: mod_base = OTHER; note = 2'-O-methoxyethyl modified thymine with phosphorothioate linkage
  modified_base 11: mod_base = OTHER; note = 2'-O-methoxyethyl 5-methylcytosine with phosphorothioate linkage
  modified_base 12: mod_base = OTHER; note = 2'-O-methoxyethyl 5-methylcytosine with phosphorothioate linkage
  modified_base 13: mod_base = OTHER; note = 2'-O-methoxyethyl 5-methylcytosine with phosphorothioate linkage
  modified_base 14: mod_base = OTHER; note = 2'-O-methoxyethyl modified thymine with phosphorothioate linkage
  modified_base 15: mod_base = OTHER; note = 2'-O-methoxyethyl 5-methylcytosine with phosphorothioate linkage
  modified_base 16: mod_base = OTHER; note = 2'-O-methoxyethyl 5-methylcytosine with phosphorothioate linkage
  modified_base 17: mod_base = OTHER; note = 2'-O-methoxyethyl modified thymine with phosphorothioate linkage
  modified_base 18: mod_base = OTHER; note = 2'-O-methoxyethyl 5-methylcytosine with phosphorothioate linkage
  modified_base 19: mod_base = OTHER; note = 2'-O-methoxyethyl 5-methylcytosine with phosphorothioate linkage
  modified_base 20: mod_base = OTHER; note = 2'-O-methoxyethyl modified thymine
gaaccattatccctcctcct

SEQ ID NO: 139 - RNA, 20 nt, synthetic construct
  source 1..20: mol_type = other RNA
  modified_base 1: mod_base = OTHER; note = 2'-O-methoxyethyl modified nucleotide with phosphorothioate linkage
  modified_base 2: mod_base = OTHER; note = 2'-O-methoxyethyl modified thymine with phosphorothioate linkage
  modified_base 3: mod_base = OTHER; note = 2'-O-methoxyethyl modified thymine with phosphorothioate linkage
  modified_base 4: mod_base = OTHER; note = 2'-O-methoxyethyl modified nucleotide with phosphorothioate linkage
  modified_base 5: mod_base = OTHER; note = 2'-O-methoxyethyl modified thymine with phosphorothioate linkage
  modified_base 6: mod_base = OTHER; note = 2'-O-methoxyethyl 5-methylcytosine with phosphorothioate linkage
  modified_base 7: mod_base = OTHER; note = 2'-O-methoxyethyl 5-methylcytosine with phosphorothioate linkage
  modified_base 8: mod_base = OTHER; note = 2'-O-methoxyethyl 5-methylcytosine with phosphorothioate linkage
  modified_base 9: mod_base = OTHER; note = 2'-O-methoxyethyl modified thymine with phosphorothioate linkage
  modified_base 10: mod_base = OTHER; note = 2'-O-methoxyethyl 5-methylcytosine with phosphorothioate linkage
  modified_base 11: mod_base = OTHER; note = 2'-O-methoxyethyl 5-methylcytosine with phosphorothioate linkage
  modified_base 12: mod_base = OTHER; note = 2'-O-methoxyethyl modified thymine with phosphorothioate linkage
  modified_base 13: mod_base = OTHER; note = 2'-O-methoxyethyl 5-methylcytosine with phosphorothioate linkage
  modified_base 14: mod_base = OTHER; note = 2'-O-methoxyethyl 5-methylcytosine with phosphorothioate linkage
  modified_base 15: mod_base = OTHER; note = 2'-O-methoxyethyl modified thymine with phosphorothioate linkage
  modified_base 16: mod_base = OTHER; note = 2'-O-methoxyethyl modified nucleotide with phosphorothioate linkage
  modified_base 17: mod_base = OTHER; note = 2'-O-methoxyethyl modified nucleotide with phosphorothioate linkage
  modified_base 18: mod_base = OTHER; note = 2'-O-methoxyethyl 5-methylcytosine with phosphorothioate linkage
  modified_base 19: mod_base = OTHER; note = 2'-O-methoxyethyl modified nucleotide with phosphorothioate linkage
  modified_base 20: mod_base = OTHER; note = 2'-O-methoxyethyl modified thymine
attatccctcctcctggcgt

SEQ ID NO: 140 - RNA, 20 nt, synthetic construct
  source 1..20: mol_type = other RNA
  modified_base 1: mod_base = OTHER; note = 2'-O-methoxyethyl 5-methylcytosine with phosphorothioate linkage
  modified_base 2: mod_base = OTHER; note = 2'-O-methoxyethyl 5-methylcytosine with phosphorothioate linkage
  modified_base 3: mod_base = OTHER; note = 2'-O-methoxyethyl 5-methylcytosine with phosphorothioate linkage
  modified_base 4: mod_base = OTHER; note = 2'-O-methoxyethyl modified thymine with phosphorothioate linkage
  modified_base 5: mod_base = OTHER; note = 2'-O-methoxyethyl 5-methylcytosine with phosphorothioate linkage
  modified_base 6: mod_base = OTHER; note = 2'-O-methoxyethyl 5-methylcytosine with phosphorothioate linkage
  modified_base 7: mod_base = OTHER; note = 2'-O-methoxyethyl modified thymine with phosphorothioate linkage
  modified_base 8: mod_base = OTHER; note = 2'-O-methoxyethyl 5-methylcytosine with phosphorothioate linkage
  modified_base 9: mod_base = OTHER; note = 2'-O-methoxyethyl 5-methylcytosine with phosphorothioate linkage
  modified_base 10: mod_base = OTHER; note = 2'-O-methoxyethyl modified thymine with phosphorothioate linkage
  modified_base 11: mod_base = OTHER; note = 2'-O-methoxyethyl modified nucleotide with phosphorothioate linkage
  modified_base 12: mod_base = OTHER; note = 2'-O-methoxyethyl modified nucleotide with phosphorothioate linkage
  modified_base 13: mod_base = OTHER; note = 2'-O-methoxyethyl 5-methylcytosine with phosphorothioate linkage
  modified_base 14: mod_base = OTHER; note = 2'-O-methoxyethyl modified nucleotide with phosphorothioate linkage
  modified_base 15: mod_base = OTHER; note = 2'-O-methoxyethyl modified thymine with phosphorothioate linkage
  modified_base 16: mod_base = OTHER; note = 2'-O-methoxyethyl 5-methylcytosine with phosphorothioate linkage
  modified_base 17: mod_base = OTHER; note = 2'-O-methoxyethyl modified thymine with phosphorothioate linkage
  modified_base 18: mod_base = OTHER; note = 2'-O-methoxyethyl modified nucleotide with phosphorothioate linkage
  modified_base 19: mod_base = OTHER; note = 2'-O-methoxyethyl 5-methylcytosine with phosphorothioate linkage
  modified_base 20: mod_base = OTHER; note = 2'-O-methoxyethyl modified nucleotide
ccctcctcctggcgtctacg

SEQ ID NO: 141 - RNA, 20 nt, synthetic construct
  source 1..20: mol_type = other RNA
  modified_base 1: mod_base = OTHER; note = 2'-O-methoxyethyl 5-methylcytosine with phosphorothioate linkage
  modified_base 2: mod_base = OTHER; note = 2'-O-methoxyethyl modified thymine with phosphorothioate linkage
  modified_base 3: mod_base = OTHER; note = 2'-O-methoxyethyl 5-methylcytosine with phosphorothioate linkage
  modified_base 4: mod_base = OTHER; note = 2'-O-methoxyethyl 5-methylcytosine with phosphorothioate linkage
  modified_base 5: mod_base = OTHER; note = 2'-O-methoxyethyl modified thymine with phosphorothioate linkage
  modified_base 6: mod_base = OTHER; note = 2'-O-methoxyethyl modified nucleotide with phosphorothioate linkage
  modified_base 7: mod_base = OTHER; note = 2'-O-methoxyethyl modified nucleotide with phosphorothioate linkage
  modified_base 8: mod_base = OTHER; note = 2'-O-methoxyethyl 5-methylcytosine with phosphorothioate linkage
  modified_base 9: mod_base = OTHER; note = 2'-O-methoxyethyl modified nucleotide with phosphorothioate linkage
  modified_base 10: mod_base = OTHER; note = 2'-O-methoxyethyl modified thymine with phosphorothioate linkage
  modified_base 11: mod_base = OTHER; note = 2'-O-methoxyethyl 5-methylcytosine with phosphorothioate linkage
  modified_base 12: mod_base = OTHER; note = 2'-O-methoxyethyl modified thymine with phosphorothioate linkage
  modified_base 13: mod_base = OTHER; note = 2'-O-methoxyethyl modified nucleotide with phosphorothioate linkage
  modified_base 14: mod_base = OTHER; note = 2'-O-methoxyethyl 5-methylcytosine with phosphorothioate linkage
  modified_base 15: mod_base = OTHER; note = 2'-O-methoxyethyl modified nucleotide with phosphorothioate linkage
  modified_base 16: mod_base = OTHER; note = 2'-O-methoxyethyl modified nucleotide with phosphorothioate linkage
  modified_base 17: mod_base = OTHER; note = 2'-O-methoxyethyl modified thymine with phosphorothioate linkage
  modified_base 18: mod_base = OTHER; note = 2'-O-methoxyethyl modified nucleotide with phosphorothioate linkage
  modified_base 19: mod_base = OTHER; note = 2'-O-methoxyethyl 5-methylcytosine with phosphorothioate linkage
  modified_base 20: mod_base = OTHER; note = 2'-O-methoxyethyl modified thymine
ctcctggcgtctacgatgct

SEQ ID NO: 142 - RNA, 20 nt, synthetic construct
  source 1..20: mol_type = other RNA
  modified_base 1: mod_base = OTHER; note = 2'-O-methoxyethyl modified nucleotide with phosphorothioate linkage
  modified_base 2: mod_base = OTHER; note = 2'-O-methoxyethyl modified nucleotide with phosphorothioate linkage
  modified_base 3: mod_base = OTHER; note = 2'-O-methoxyethyl 5-methylcytosine with phosphorothioate linkage
  modified_base 4: mod_base = OTHER; note = 2'-O-methoxyethyl modified nucleotide with phosphorothioate linkage
  modified_base 5: mod_base = OTHER; note = 2'-O-methoxyethyl modified thymine with phosphorothioate linkage
  modified_base 6: mod_base = OTHER; note = 2'-O-methoxyethyl 5-methylcytosine with phosphorothioate linkage
  modified_base 7: mod_base = OTHER; note = 2'-O-methoxyethyl modified thymine with phosphorothioate linkage
  modified_base 8: mod_base = OTHER; note = 2'-O-methoxyethyl modified nucleotide with phosphorothioate linkage
  modified_base 9: mod_base = OTHER; note = 2'-O-methoxyethyl 5-methylcytosine with phosphorothioate linkage
  modified_base 10: mod_base = OTHER; note = 2'-O-methoxyethyl modified nucleotide with phosphorothioate linkage
  modified_base 11: mod_base = OTHER; note = 2'-O-methoxyethyl modified nucleotide with phosphorothioate linkage
  modified_base 12: mod_base = OTHER; note = 2'-O-methoxyethyl modified thymine with phosphorothioate linkage
  modified_base 13: mod_base = OTHER; note = 2'-O-methoxyethyl modified nucleotide with phosphorothioate linkage
  modified_base 14: mod_base = OTHER; note = 2'-O-methoxyethyl 5-methylcytosine with phosphorothioate linkage
  modified_base 15: mod_base = OTHER; note = 2'-O-methoxyethyl modified thymine with phosphorothioate linkage
  modified_base 16: mod_base = OTHER; note = 2'-O-methoxyethyl 5-methylcytosine with phosphorothioate linkage
  modified_base 17: mod_base = OTHER; note = 2'-O-methoxyethyl modified nucleotide with phosphorothioate linkage
  modified_base 18: mod_base = OTHER; note = 2'-O-methoxyethyl modified nucleotide with phosphorothioate linkage
  modified_base 19: mod_base = OTHER; note = 2'-O-methoxyethyl modified nucleotide with phosphorothioate linkage
  modified_base 20: mod_base = OTHER; note = 2'-O-methoxyethyl modified nucleotide
ggcgtctacgatgctcaggg

SEQ ID NO: 143 - RNA, 20 nt, synthetic construct
  source 1..20: mol_type = other RNA
  modified_base 1: mod_base = OTHER; note = 2'-O-methoxyethyl 5-methylcytosine with phosphorothioate linkage
  modified_base 2: mod_base = OTHER; note = 2'-O-methoxyethyl modified thymine with phosphorothioate linkage
  modified_base 3: mod_base = OTHER; note = 2'-O-methoxyethyl modified nucleotide with phosphorothioate linkage
  modified_base 4: mod_base = OTHER; note = 2'-O-methoxyethyl 5-methylcytosine with phosphorothioate linkage
  modified_base 5: mod_base = OTHER; note = 2'-O-methoxyethyl modified nucleotide with phosphorothioate linkage
  modified_base 6: mod_base = OTHER; note = 2'-O-methoxyethyl modified nucleotide with phosphorothioate linkage
  modified_base 7: mod_base = OTHER; note = 2'-O-methoxyethyl modified thymine with phosphorothioate linkage
  modified_base 8: mod_base = OTHER; note = 2'-O-methoxyethyl modified nucleotide with phosphorothioate linkage
  modified_base 9: mod_base = OTHER; note = 2'-O-methoxyethyl 5-methylcytosine with phosphorothioate linkage
  modified_base 10: mod_base = OTHER; note = 2'-O-methoxyethyl modified thymine with phosphorothioate linkage
  modified_base 11: mod_base = OTHER; note = 2'-O-methoxyethyl 5-methylcytosine with phosphorothioate linkage
  modified_base 12: mod_base = OTHER; note = 2'-O-methoxyethyl modified nucleotide with phosphorothioate linkage
  modified_base 13: mod_base = OTHER; note = 2'-O-methoxyethyl modified nucleotide with phosphorothioate linkage
  modified_base 14: mod_base = OTHER; note = 2'-O-methoxyethyl modified nucleotide with phosphorothioate linkage
  modified_base 15: mod_base = OTHER; note = 2'-O-methoxyethyl modified nucleotide with phosphorothioate linkage
  modified_base 16: mod_base = OTHER; note = 2'-O-methoxyethyl modified nucleotide with phosphorothioate linkage
  modified_base 17: mod_base = OTHER; note = 2'-O-methoxyethyl modified nucleotide with phosphorothioate linkage
  modified_base 18: mod_base = OTHER; note = 2'-O-methoxyethyl 5-methylcytosine with phosphorothioate linkage
  modified_base 19: mod_base = OTHER; note = 2'-O-methoxyethyl modified nucleotide with phosphorothioate linkage
  modified_base 20: mod_base = OTHER; note = 2'-O-methoxyethyl modified nucleotide
ctacgatgctcagggagcag

SEQ ID NO: 144 - RNA, 20 nt, synthetic construct
  source 1..20: mol_type = other RNA
  modified_base 1: mod_base = OTHER; note = 2'-O-methoxyethyl 5-methylcytosine with phosphorothioate linkage
  modified_base 2: mod_base = OTHER; note = 2'-O-methoxyethyl modified nucleotide with phosphorothioate linkage
  modified_base 3: mod_base = OTHER; note = 2'-O-methoxyethyl modified nucleotide with phosphorothioate linkage
  modified_base 4: mod_base = OTHER; note = 2'-O-methoxyethyl modified nucleotide with phosphorothioate linkage
  modified_base 5: mod_base = OTHER; note = 2'-O-methoxyethyl modified nucleotide with phosphorothioate linkage
  modified_base 6: mod_base = OTHER; note = 2'-O-methoxyethyl modified nucleotide with phosphorothioate linkage
  modified_base 7: mod_base = OTHER; note = 2'-O-methoxyethyl modified nucleotide with phosphorothioate linkage
  modified_base 8: mod_base = OTHER; note = 2'-O-methoxyethyl 5-methylcytosine with phosphorothioate linkage
  modified_base 9: mod_base = OTHER; note = 2'-O-methoxyethyl modified nucleotide with phosphorothioate linkage
  modified_base 10: mod_base = OTHER; note = 2'-O-methoxyethyl modified nucleotide with phosphorothioate linkage
  modified_base 11: mod_base = OTHER; note = 2'-O-methoxyethyl modified thymine with phosphorothioate linkage
  modified_base 12: mod_base = OTHER; note = 2'-O-methoxyethyl modified thymine with phosphorothioate linkage
  modified_base 13: mod_base = OTHER; note = 2'-O-methoxyethyl modified nucleotide with phosphorothioate linkage
  modified_base 14: mod_base = OTHER; note = 2'-O-methoxyethyl modified thymine with phosphorothioate linkage
  modified_base 15: mod_base = OTHER; note = 2'-O-methoxyethyl modified thymine with phosphorothioate linkage
  modified_base 16: mod_base = OTHER; note = 2'-O-methoxyethyl 5-methylcytosine with phosphorothioate linkage
  modified_base 17: mod_base = OTHER; note = 2'-O-methoxyethyl 5-methylcytosine with phosphorothioate linkage
  modified_base 18: mod_base = OTHER; note = 2'-O-methoxyethyl modified thymine with phosphorothioate linkage
  modified_base 19: mod_base = OTHER; note = 2'-O-methoxyethyl modified nucleotide with phosphorothioate linkage
  modified_base 20: mod_base = OTHER; note = 2'-O-methoxyethyl 5-methylcytosine
cagggagcagttgttcctac

SEQ ID NO: 145 - RNA, 20 nt, synthetic construct
  source 1..20: mol_type = other RNA
  modified_base 1: mod_base = OTHER; note = 2'-O-methoxyethyl modified nucleotide with phosphorothioate linkage
  modified_base 2: mod_base = OTHER; note = 2'-O-methoxyethyl modified nucleotide with phosphorothioate linkage
  modified_base 3: mod_base = OTHER; note = 2'-O-methoxyethyl 5-methylcytosine with phosphorothioate linkage
  modified_base 4: mod_base = OTHER; note = 2'-O-methoxyethyl modified nucleotide with phosphorothioate linkage
  modified_base 5: mod_base = OTHER; note = 2'-O-methoxyethyl modified nucleotide with phosphorothioate linkage
  modified_base 6: mod_base = OTHER; note = 2'-O-methoxyethyl modified thymine with phosphorothioate linkage
  modified_base 7: mod_base = OTHER; note = 2'-O-methoxyethyl modified thymine with phosphorothioate linkage
  modified_base 8: mod_base = OTHER; note = 2'-O-methoxyethyl modified nucleotide with phosphorothioate linkage
  modified_base 9: mod_base = OTHER; note = 2'-O-methoxyethyl modified thymine with phosphorothioate linkage
  modified_base 10: mod_base = OTHER; note = 2'-O-methoxyethyl modified thymine with phosphorothioate linkage
  modified_base 11: mod_base = OTHER; note = 2'-O-methoxyethyl 5-methylcytosine with phosphorothioate linkage
  modified_base 12: mod_base = OTHER; note = 2'-O-methoxyethyl 5-methylcytosine with phosphorothioate linkage
  modified_base 13: mod_base = OTHER; note = 2'-O-methoxyethyl modified thymine with phosphorothioate linkage
  modified_base 14: mod_base = OTHER; note = 2'-O-methoxyethyl modified nucleotide with phosphorothioate linkage
  modified_base 15: mod_base = OTHER; note = 2'-O-methoxyethyl 5-methylcytosine with phosphorothioate linkage
  modified_base 16: mod_base = OTHER; note = 2'-O-methoxyethyl modified thymine with phosphorothioate linkage
  modified_base 17: mod_base = OTHER; note = 2'-O-methoxyethyl modified nucleotide with phosphorothioate linkage
  modified_base 18: mod_base = OTHER; note = 2'-O-methoxyethyl modified nucleotide with phosphorothioate linkage
  modified_base 19: mod_base = OTHER; note = 2'-O-methoxyethyl modified nucleotide with phosphorothioate linkage
  modified_base 20: mod_base = OTHER; note = 2'-O-methoxyethyl modified nucleotide
agcagttgttcctactggga

SEQ ID NO: 146 - RNA, 20 nt, synthetic construct
  source 1..20: mol_type = other RNA
  modified_base 1: mod_base = OTHER; note = 2'-O-methoxyethyl modified thymine with phosphorothioate linkage
  modified_base 2: mod_base = OTHER; note = 2'-O-methoxyethyl modified thymine with phosphorothioate linkage
  modified_base 3: mod_base = OTHER; note = 2'-O-methoxyethyl modified nucleotide with phosphorothioate linkage
  modified_base 4: mod_base = OTHER; note = 2'-O-methoxyethyl modified thymine with phosphorothioate linkage
  modified_base 5: mod_base = OTHER; note = 2'-O-methoxyethyl modified thymine with phosphorothioate linkage
  modified_base 6: mod_base = OTHER; note = 2'-O-methoxyethyl 5-methylcytosine with phosphorothioate linkage
  modified_base 7: mod_base = OTHER; note = 2'-O-methoxyethyl 5-methylcytosine with phosphorothioate linkage
  modified_base 8: mod_base = OTHER; note = 2'-O-methoxyethyl modified thymine with phosphorothioate linkage
  modified_base 9: mod_base = OTHER; note = 2'-O-methoxyethyl modified nucleotide with phosphorothioate linkage
  modified_base 10: mod_base = OTHER; note = 2'-O-methoxyethyl 5-methylcytosine with phosphorothioate linkage
  modified_base 11: mod_base = OTHER; note = 2'-O-methoxyethyl modified thymine with phosphorothioate linkage
  modified_base 12: mod_base = OTHER; note = 2'-O-methoxyethyl modified nucleotide with phosphorothioate linkage
  modified_base 13: mod_base = OTHER; note = 2'-O-methoxyethyl modified nucleotide with phosphorothioate linkage
  modified_base 14: mod_base = OTHER; note = 2'-O-methoxyethyl modified nucleotide with phosphorothioate linkage
  modified_base 15: mod_base = OTHER; note = 2'-O-methoxyethyl modified nucleotide with phosphorothioate linkage
  modified_base 16: mod_base = OTHER; note = 2'-O-methoxyethyl modified thymine with phosphorothioate linkage
  modified_base 17: mod_base = OTHER; note = 2'-O-methoxyethyl 5-methylcytosine with phosphorothioate linkage
  modified_base 18: mod_base = OTHER; note = 2'-O-methoxyethyl 5-methylcytosine with phosphorothioate linkage
  modified_base 19: mod_base = OTHER; note = 2'-O-methoxyethyl 5-methylcytosine with phosphorothioate linkage
  modified_base 20: mod_base = OTHER; note = 2'-O-methoxyethyl 5-methylcytosine
ttgttcctactgggatcccc

SEQ ID NO: 147 - RNA, 20 nt, synthetic construct
  source 1..20: mol_type = other RNA
  modified_base 1: mod_base = OTHER; note = 2'-O-methoxyethyl 5-methylcytosine with phosphorothioate linkage
  modified_base 2: mod_base = OTHER; note = 2'-O-methoxyethyl 5-methylcytosine with phosphorothioate linkage
  modified_base 3: mod_base = OTHER; note = 2'-O-methoxyethyl modified thymine with phosphorothioate linkage
  modified_base 4: mod_base = OTHER; note = 2'-O-methoxyethyl modified nucleotide with phosphorothioate linkage
  modified_base 5: mod_base = OTHER; note = 2'-O-methoxyethyl 5-methylcytosine with phosphorothioate linkage
  modified_base 6: mod_base = OTHER; note = 2'-O-methoxyethyl modified thymine with phosphorothioate linkage
  modified_base 7: mod_base = OTHER; note = 2'-O-methoxyethyl modified nucleotide with phosphorothioate linkage
  modified_base 8: mod_base = OTHER; note = 2'-O-methoxyethyl modified nucleotide with phosphorothioate linkage
  modified_base 9: mod_base = OTHER; note = 2'-O-methoxyethyl modified nucleotide with phosphorothioate linkage
  modified_base 10: mod_base = OTHER; note = 2'-O-methoxyethyl modified nucleotide with phosphorothioate linkage
  modified_base 11: mod_base = OTHER; note = 2'-O-methoxyethyl modified thymine with phosphorothioate linkage
  modified_base 12: mod_base = OTHER; note = 2'-O-methoxyethyl 5-methylcytosine with phosphorothioate linkage
  modified_base 13: mod_base = OTHER; note = 2'-O-methoxyethyl 5-methylcytosine with phosphorothioate linkage
  modified_base 14: mod_base = OTHER; note = 2'-O-methoxyethyl 5-methylcytosine with phosphorothioate linkage
  modified_base 15: mod_base = OTHER; note = 2'-O-methoxyethyl 5-methylcytosine with phosphorothioate linkage
  modified_base 16: mod_base = OTHER; note = 2'-O-methoxyethyl modified nucleotide with phosphorothioate linkage
  modified_base 17: mod_base = OTHER; note = 2'-O-methoxyethyl modified nucleotide with phosphorothioate linkage
  modified_base 18: mod_base = OTHER; note = 2'-O-methoxyethyl modified nucleotide with phosphorothioate linkage
  modified_base 19: mod_base = OTHER; note = 2'-O-methoxyethyl modified nucleotide with phosphorothioate linkage
  modified_base 20: mod_base = OTHER; note = 2'-O-methoxyethyl modified nucleotide
cctactgggatccccaagga

SEQ ID NO: 148 - RNA, 20 nt, synthetic construct
  source 1..20: mol_type = other RNA
  modified_base 1: mod_base = OTHER; note = 2'-O-methoxyethyl modified thymine with phosphorothioate linkage
  modified_base 2: mod_base = OTHER; note = 2'-O-methoxyethyl modified nucleotide with phosphorothioate linkage
  modified_base 3: mod_base = OTHER; note = 2'-O-methoxyethyl modified nucleotide with phosphorothioate linkage
  modified_base 4: mod_base = OTHER; note = 2'-O-methoxyethyl modified nucleotide with phosphorothioate linkage
  modified_base 5: mod_base = OTHER; note = 2'-O-methoxyethyl modified nucleotide with phosphorothioate linkage
  modified_base 6: mod_base = OTHER; note = 2'-O-methoxyethyl modified thymine with phosphorothioate linkage
  modified_base 7: mod_base = OTHER; note = 2'-O-methoxyethyl 5-methylcytosine with phosphorothioate linkage
  modified_base 8: mod_base = OTHER; note = 2'-O-methoxyethyl 5-methylcytosine with phosphorothioate linkage
  modified_base 9: mod_base = OTHER; note = 2'-O-methoxyethyl 5-methylcytosine with phosphorothioate linkage
  modified_base 10: mod_base = OTHER; note = 2'-O-methoxyethyl 5-methylcytosine with phosphorothioate linkage
  modified_base 11: mod_base = OTHER; note = 2'-O-methoxyethyl modified nucleotide with phosphorothioate linkage
  modified_base 12: mod_base = OTHER; note = 2'-O-methoxyethyl modified nucleotide with phosphorothioate linkage
  modified_base 13: mod_base = OTHER; note = 2'-O-methoxyethyl modified nucleotide with phosphorothioate linkage
  modified_base 14: mod_base = OTHER; note = 2'-O-methoxyethyl modified nucleotide with phosphorothioate linkage
  modified_base 15: mod_base = OTHER; note = 2'-O-methoxyethyl modified nucleotide with phosphorothioate linkage
  modified_base 16: mod_base = OTHER; note = 2'-O-methoxyethyl modified nucleotide with phosphorothioate linkage
  modified_base 17: mod_base = OTHER; note = 2'-O-methoxyethyl modified nucleotide with phosphorothioate linkage
  modified_base 18: mod_base = OTHER; note = 2'-O-methoxyethyl 5-methylcytosine with phosphorothioate linkage
  modified_base 19: mod_base = OTHER; note = 2'-O-methoxyethyl modified nucleotide with phosphorothioate linkage
  modified_base 20: mod_base = OTHER; note = 2'-O-methoxyethyl modified nucleotide
tgggatccccaaggaggcgg

SEQ ID NO: 149 - RNA, 20 nt, synthetic construct
  source 1..20: mol_type = other RNA
  modified_base 1: mod_base = OTHER; note = 2'-O-methoxyethyl modified thymine with phosphorothioate linkage
  modified_base 2: mod_base = OTHER; note = 2'-O-methoxyethyl 5-methylcytosine with phosphorothioate linkage
  modified_base 3: mod_base = OTHER; note = 2'-O-methoxyethyl 5-methylcytosine with phosphorothioate linkage
  modified_base 4: mod_base = OTHER; note = 2'-O-methoxyethyl 5-methylcytosine with phosphorothioate linkage
  modified_base 5: mod_base = OTHER; note = 2'-O-methoxyethyl 5-methylcytosine with phosphorothioate linkage
  modified_base 6: mod_base = OTHER; note = 2'-O-methoxyethyl modified nucleotide with phosphorothioate linkage
  modified_base 7: mod_base = OTHER; note = 2'-O-methoxyethyl modified nucleotide with phosphorothioate linkage
  modified_base 8: mod_base = OTHER; note = 2'-O-methoxyethyl modified nucleotide with phosphorothioate linkage
  modified_base 9: mod_base = OTHER; note = 2'-O-methoxyethyl modified nucleotide with phosphorothioate linkage
  modified_base 10: mod_base = OTHER; note = 2'-O-methoxyethyl modified nucleotide with phosphorothioate linkage
  modified_base 11: mod_base = OTHER; note = 2'-O-methoxyethyl modified nucleotide with phosphorothioate linkage
  modified_base 12: mod_base = OTHER; note = 2'-O-methoxyethyl modified nucleotide with phosphorothioate linkage
  modified_base 13: mod_base = OTHER; note = 2'-O-methoxyethyl 5-methylcytosine with phosphorothioate linkage
  modified_base 14: mod_base = OTHER; note = 2'-O-methoxyethyl modified nucleotide with phosphorothioate linkage
  modified_base 15: mod_base = OTHER; note = 2'-O-methoxyethyl modified nucleotide with phosphorothioate linkage
  modified_base 16: mod_base = OTHER; note = 2'-O-methoxyethyl modified nucleotide with phosphorothioate linkage
  modified_base 17: mod_base = OTHER; note = 2'-O-methoxyethyl modified nucleotide with phosphorothioate linkage
  modified_base 18: mod_base = OTHER; note = 2'-O-methoxyethyl modified thymine with phosphorothioate linkage
  modified_base 19: mod_base = OTHER; note = 2'-O-methoxyethyl 5-methylcytosine with phosphorothioate linkage
  modified_base 20: mod_base = OTHER; note = 2'-O-methoxyethyl modified thymine
tccccaaggaggcggaatct

SEQ ID NO: 150 - RNA, 20 nt, synthetic construct
  source 1..20: mol_type = other RNA
  modified_base 1: mod_base = OTHER; note = 2'-O-methoxyethyl modified nucleotide with phosphorothioate linkage
  modified_base 2: mod_base = OTHER; note = 2'-O-methoxyethyl modified nucleotide with phosphorothioate linkage
  modified_base 3: mod_base = OTHER; note = 2'-O-methoxyethyl modified nucleotide with phosphorothioate linkage
  modified_base 4: mod_base = OTHER; note = 2'-O-methoxyethyl modified nucleotide with phosphorothioate linkage
  modified_base 5: mod_base = OTHER; note = 2'-O-methoxyethyl modified nucleotide with phosphorothioate linkage
  modified_base 6: mod_base = OTHER; note = 2'-O-methoxyethyl modified nucleotide with phosphorothioate linkage
  modified_base 7: mod_base = OTHER; note = 2'-O-methoxyethyl modified nucleotide with phosphorothioate linkage
  modified_base 8: mod_base = OTHER; note = 2'-O-methoxyethyl 5-methylcytosine with phosphorothioate linkage
  modified_base 9: mod_base = OTHER; note = 2'-O-methoxyethyl modified nucleotide with phosphorothioate linkage
  modified_base 10: mod_base = OTHER; note = 2'-O-methoxyethyl modified nucleotide with phosphorothioate linkage
  modified_base 11: mod_base = OTHER; note = 2'-O-methoxyethyl modified nucleotide with phosphorothioate linkage
  modified_base 12: mod_base = OTHER; note = 2'-O-methoxyethyl modified nucleotide with phosphorothioate linkage
  modified_base 13: mod_base = OTHER; note = 2'-O-methoxyethyl modified thymine with phosphorothioate linkage
  modified_base 14: mod_base = OTHER; note = 2'-O-methoxyethyl 5-methylcytosine with phosphorothioate linkage
  modified_base 15: mod_base = OTHER; note = 2'-O-methoxyethyl modified thymine with phosphorothioate linkage
  modified_base 16: mod_base = OTHER; note = 2'-O-methoxyethyl modified nucleotide with phosphorothioate linkage
  modified_base 17: mod_base = OTHER; note = 2'-O-methoxyethyl 5-methylcytosine with phosphorothioate linkage
  modified_base 18: mod_base = OTHER; note = 2'-O-methoxyethyl 5-methylcytosine with phosphorothioate linkage
  modified_base 19: mod_base = OTHER; note = 2'-O-methoxyethyl 5-methylcytosine with phosphorothioate linkage
  modified_base 20: mod_base = OTHER; note = 2'-O-methoxyethyl modified thymine
aaggaggcggaatctgccct

SEQ ID NO: 151 - RNA, 20 nt, synthetic construct
  source 1..20: mol_type = other RNA
  modified_base 1: mod_base = OTHER; note = 2'-O-methoxyethyl modified nucleotide with phosphorothioate linkage
  modified_base 2: mod_base = OTHER; note = 2'-O-methoxyethyl modified nucleotide with phosphorothioate linkage
  modified_base 3: mod_base = OTHER; note = 2'-O-methoxyethyl 5-methylcytosine with phosphorothioate linkage
  modified_base 4: mod_base = OTHER; note = 2'-O-methoxyethyl modified nucleotide with phosphorothioate linkage
  modified_base 5: mod_base = OTHER; note = 2'-O-methoxyethyl modified nucleotide with phosphorothioate linkage
  modified_base 6: mod_base = OTHER; note = 2'-O-methoxyethyl modified nucleotide with phosphorothioate linkage
  modified_base 7: mod_base = OTHER; note = 2'-O-methoxyethyl modified nucleotide with phosphorothioate linkage
  modified_base 8: mod_base = OTHER; note = 2'-O-methoxyethyl modified thymine with phosphorothioate linkage
  modified_base 9: mod_base = OTHER; note = 2'-O-methoxyethyl 5-methylcytosine with phosphorothioate linkage
  modified_base 10: mod_base = OTHER; note = 2'-O-methoxyethyl modified thymine with phosphorothioate linkage
  modified_base 11: mod_base = OTHER; note = 2'-O-methoxyethyl modified nucleotide with phosphorothioate linkage
  modified_base 12: mod_base = OTHER; note = 2'-O-methoxyethyl 5-methylcytosine with phosphorothioate linkage
  modified_base 13: mod_base = OTHER; note = 2'-O-methoxyethyl 5-methylcytosine with phosphorothioate linkage
  modified_base 14: mod_base = OTHER; note = 2'-O-methoxyethyl 5-methylcytosine with phosphorothioate linkage
  modified_base 15: mod_base = OTHER; note = 2'-O-methoxyethyl modified thymine with phosphorothioate linkage
  modified_base 16: mod_base = OTHER; note = 2'-O-methoxyethyl modified nucleotide with phosphorothioate linkage
  modified_base 17: mod_base = OTHER; note = 2'-O-methoxyethyl modified nucleotide with phosphorothioate linkage
  modified_base 18: mod_base = OTHER; note = 2'-O-methoxyethyl modified nucleotide with phosphorothioate linkage
  modified_base 19: mod_base = OTHER; note = 2'-O-methoxyethyl modified thymine with phosphorothioate linkage
  modified_base 20: mod_base = OTHER; note = 2'-O-methoxyethyl 5-methylcytosine
ggcggaatctgccctgagtc

SEQ ID NO: 152 - RNA, 20 nt, synthetic construct
  source 1..20: mol_type = other RNA
  modified_base 1: mod_base = OTHER; note = 2'-O-methoxyethyl modified nucleotide with phosphorothioate linkage
  modified_base 2: mod_base = OTHER; note = 2'-O-methoxyethyl modified nucleotide with phosphorothioate linkage
  modified_base 3: mod_base = OTHER; note = 2'-O-methoxyethyl modified thymine with phosphorothioate linkage
  modified_base 4: mod_base = OTHER; note = 2'-O-methoxyethyl 5-methylcytosine with phosphorothioate linkage
  modified_base 5: mod_base = OTHER; note = 2'-O-methoxyethyl modified thymine with phosphorothioate linkage
  modified_base 6: mod_base = OTHER; note = 2'-O-methoxyethyl modified nucleotide with phosphorothioate linkage
  modified_base 7: mod_base = OTHER; note = 2'-O-methoxyethyl 5-methylcytosine with phosphorothioate linkage
  modified_base 8: mod_base = OTHER; note = 2'-O-methoxyethyl 5-methylcytosine with phosphorothioate linkage
  modified_base 9: mod_base = OTHER; note = 2'-O-methoxyethyl 5-methylcytosine with phosphorothioate linkage
  modified_base 10: mod_base = OTHER; note = 2'-O-methoxyethyl modified thymine with phosphorothioate linkage
  modified_base 11: mod_base = OTHER; note = 2'-O-methoxyethyl modified nucleotide with phosphorothioate linkage
  modified_base 12: mod_base = OTHER; note = 2'-O-methoxyethyl modified nucleotide with phosphorothioate linkage
  modified_base 13: mod_base = OTHER; note = 2'-O-methoxyethyl modified nucleotide with phosphorothioate linkage
  modified_base 14: mod_base = OTHER; note = 2'-O-methoxyethyl modified thymine with phosphorothioate linkage
  modified_base 15: mod_base = OTHER; note = 2'-O-methoxyethyl 5-methylcytosine with phosphorothioate linkage
  modified_base 16: mod_base = OTHER; note = 2'-O-methoxyethyl modified thymine with phosphorothioate linkage
  modified_base 17: mod_base = OTHER; note = 2'-O-methoxyethyl 5-methylcytosine with phosphorothioate linkage
  modified_base 18: mod_base = OTHER; note = 2'-O-methoxyethyl 5-methylcytosine with phosphorothioate linkage
  modified_base 19: mod_base = OTHER; note = 2'-O-methoxyethyl modified thymine with phosphorothioate linkage
  modified_base 20: mod_base = OTHER; note = 2'-O-methoxyethyl 5-methylcytosine
aatctgccctgagtctcctc

SEQ ID NO: 153 - RNA, 20 nt, synthetic construct
  source 1..20: mol_type = other RNA
  modified_base 1: mod_base = OTHER; note = 2'-O-methoxyethyl modified nucleotide with phosphorothioate linkage
  modified_base 2: mod_base = OTHER; note = 2'-O-methoxyethyl 5-methylcytosine with phosphorothioate linkage
  modified_base 3: mod_base = OTHER; note = 2'-O-methoxyethyl 5-methylcytosine with phosphorothioate linkage
  modified_base 4: mod_base = OTHER; note = 2'-O-methoxyethyl 5-methylcytosine with phosphorothioate linkage
  modified_base 5: mod_base = OTHER; note = 2'-O-methoxyethyl modified thymine with phosphorothioate linkage
  modified_base 6: mod_base = OTHER; note = 2'-O-methoxyethyl modified nucleotide with phosphorothioate linkage
  modified_base 7: mod_base = OTHER; note = 2'-O-methoxyethyl modified nucleotide with phosphorothioate linkage
  modified_base 8: mod_base = OTHER; note = 2'-O-methoxyethyl modified nucleotide with phosphorothioate linkage
  modified_base 9: mod_base = OTHER; note = 2'-O-methoxyethyl modified thymine with phosphorothioate linkage
  modified_base 10: mod_base = OTHER; note = 2'-O-methoxyethyl 5-methylcytosine with phosphorothioate linkage
  modified_base 11: mod_base = OTHER; note = 2'-O-methoxyethyl modified thymine with phosphorothioate linkage
  modified_base 12: mod_base = OTHER; note = 2'-O-methoxyethyl 5-methylcytosine with phosphorothioate linkage
  modified_base 13: mod_base = OTHER; note = 2'-O-methoxyethyl 5-methylcytosine with phosphorothioate linkage
  modified_base 14: mod_base = OTHER; note = 2'-O-methoxyethyl modified thymine with phosphorothioate linkage
  modified_base 15: mod_base = OTHER; note = 2'-O-methoxyethyl 5-methylcytosine with phosphorothioate linkage
  modified_base 16: mod_base = OTHER; note = 2'-O-methoxyethyl 5-methylcytosine with phosphorothioate linkage
  modified_base 17: mod_base = OTHER; note = 2'-O-methoxyethyl modified thymine with phosphorothioate linkage
  modified_base 18: mod_base = OTHER; note = 2'-O-methoxyethyl modified nucleotide with phosphorothioate linkage
  modified_base 19: mod_base = OTHER; note = 2'-O-methoxyethyl modified thymine with phosphorothioate linkage
  modified_base 20: mod_base = OTHER; note = 2'-O-methoxyethyl modified nucleotide
gccctgagtctcctcctgta

SEQ ID NO: 154 - RNA, 20 nt, synthetic construct
  source 1..20: mol_type = other RNA
  modified_base 1: mod_base = OTHER; note = 2'-O-methoxyethyl modified thymine with phosphorothioate linkage
  modified_base 2: mod_base = OTHER; note = 2'-O-methoxyethyl 5-methylcytosine with phosphorothioate linkage
  modified_base 3: mod_base = OTHER; note = 2'-O-methoxyethyl 5-methylcytosine with phosphorothioate linkage
  modified_base 4: mod_base = OTHER; note = 2'-O-methoxyethyl modified thymine with phosphorothioate linkage
  modified_base 5: mod_base = OTHER; note = 2'-O-methoxyethyl 5-methylcytosine with phosphorothioate linkage
  modified_base 6: mod_base = OTHER; note = 2'-O-methoxyethyl 5-methylcytosine with phosphorothioate linkage
  modified_base 7: mod_base = OTHER; note = 2'-O-methoxyethyl modified thymine with phosphorothioate linkage
  modified_base 8: mod_base = OTHER; note = 2'-O-methoxyethyl modified nucleotide with phosphorothioate linkage
  modified_base 9: mod_base = OTHER; note = 2'-O-methoxyethyl modified thymine with phosphorothioate linkage
  modified_base 10: mod_base = OTHER; note = 2'-O-methoxyethyl modified nucleotide with phosphorothioate linkage
  modified_base 11: mod_base = OTHER; note = 2'-O-methoxyethyl 5-methylcytosine with phosphorothioate linkage
  modified_base 12: mod_base = OTHER; note = 2'-O-methoxyethyl modified thymine with phosphorothioate linkage
  modified_base 13: mod_base = OTHER; note = 2'-O-methoxyethyl modified thymine with phosphorothioate linkage
  modified_base 14: mod_base = OTHER; note = 2'-O-methoxyethyl 5-methylcytosine with phosphorothioate linkage
  modified_base 15: mod_base = OTHER; note = 2'-O-methoxyethyl modified thymine with phosphorothioate linkage
  modified_base 16: mod_base = OTHER; note = 2'-O-methoxyethyl modified thymine with phosphorothioate linkage
  modified_base 17: mod_base = OTHER; note = 2'-O-methoxyethyl modified nucleotide with phosphorothioate linkage
  modified_base 18: mod_base = OTHER; note = 2'-O-methoxyethyl modified nucleotide with phosphorothioate linkage
  modified_base 19: mod_base = OTHER; note = 2'-O-methoxyethyl modified thymine with phosphorothioate linkage
  modified_base 20: mod_base = OTHER; note = 2'-O-methoxyethyl 5-methylcytosine
tcctcctgtacttcttgatc

SEQ ID NO: 155 - RNA, 20 nt, synthetic construct
  source 1..20: mol_type = other RNA
  modified_base 1: mod_base = OTHER; note = 2'-O-methoxyethyl 5-methylcytosine with phosphorothioate linkage
  modified_base 2: mod_base = OTHER; note = 2'-O-methoxyethyl modified thymine with phosphorothioate linkage
  modified_base 3: mod_base = OTHER; note = 2'-O-methoxyethyl modified nucleotide with phosphorothioate linkage
  modified_base 4: mod_base = OTHER; note = 2'-O-methoxyethyl modified thymine with phosphorothioate linkage
  modified_base 5: mod_base = OTHER; note = 2'-O-methoxyethyl modified nucleotide with phosphorothioate linkage
  modified_base 6: mod_base = OTHER; note = 2'-O-methoxyethyl 5-methylcytosine with phosphorothioate linkage
  modified_base 7: mod_base = OTHER; note = 2'-O-methoxyethyl modified thymine with phosphorothioate linkage
  modified_base 8: mod_base = OTHER; note = 2'-O-methoxyethyl modified thymine with phosphorothioate linkage
  modified_base 9: mod_base = OTHER; note = 2'-O-methoxyethyl 5-methylcytosine with phosphorothioate linkage
  modified_base 10: mod_base = OTHER; note = 2'-O-methoxyethyl modified thymine with phosphorothioate linkage
  modified_base 11: mod_base = OTHER; note = 2'-O-methoxyethyl modified thymine with phosphorothioate linkage
  modified_base 12: mod_base = OTHER; note = 2'-O-methoxyethyl modified nucleotide with phosphorothioate linkage
  modified_base 13: mod_base = OTHER; note = 2'-O-methoxyethyl modified nucleotide with phosphorothioate linkage
  modified_base 14: mod_base = OTHER; note = 2'-O-methoxyethyl modified thymine with phosphorothioate linkage
  modified_base 15: mod_base = OTHER; note = 2'-O-methoxyethyl 5-methylcytosine with phosphorothioate linkage
  modified_base 16: mod_base = OTHER; note = 2'-O-methoxyethyl modified thymine with phosphorothioate linkage
  modified_base 17: mod_base = OTHER; note = 2'-O-methoxyethyl modified nucleotide with phosphorothioate linkage
  modified_base 18: mod_base = OTHER; note = 2'-O-methoxyethyl modified nucleotide with phosphorothioate linkage
  modified_base 19: mod_base = OTHER; note = 2'-O-methoxyethyl 5-methylcytosine with phosphorothioate linkage
  modified_base 20: mod_base = OTHER; note = 2'-O-methoxyethyl modified thymine
ctgtacttcttgatctagct

SEQ ID NO: 156 - RNA, 20 nt, synthetic construct
  source 1..20: mol_type = other RNA
  modified_base 1: mod_base = OTHER; note = 2'-O-methoxyethyl 5-methylcytosine with phosphorothioate linkage
  modified_base 2: mod_base = OTHER; note = 2'-O-methoxyethyl modified thymine with phosphorothioate linkage
  modified_base 3: mod_base = OTHER; note = 2'-O-methoxyethyl modified thymine with phosphorothioate linkage
  modified_base 4: mod_base = OTHER; note = 2'-O-methoxyethyl 5-methylcytosine with phosphorothioate linkage
  modified_base 5: mod_base = OTHER; note = 2'-O-methoxyethyl modified thymine with phosphorothioate linkage
  modified_base 6: mod_base = OTHER; note = 2'-O-methoxyethyl modified thymine with phosphorothioate linkage
  modified_base 7: mod_base = OTHER; note = 2'-O-methoxyethyl modified nucleotide with phosphorothioate linkage
  modified_base 8: mod_base = OTHER; note = 2'-O-methoxyethyl modified nucleotide with phosphorothioate linkage
  modified_base 9: mod_base = OTHER; note = 2'-O-methoxyethyl modified thymine with phosphorothioate linkage
  modified_base 10: mod_base = OTHER; note = 2'-O-methoxyethyl 5-methylcytosine with phosphorothioate linkage
  modified_base 11: mod_base = OTHER; note = 2'-O-methoxyethyl modified thymine with phosphorothioate linkage
  modified_base 12: mod_base = OTHER; note = 2'-O-methoxyethyl modified nucleotide with phosphorothioate linkage
  modified_base 13: mod_base = OTHER; note = 2'-O-methoxyethyl modified nucleotide with phosphorothioate linkage
  modified_base 14: mod_base = OTHER; note = 2'-O-methoxyethyl 5-methylcytosine with phosphorothioate linkage
  modified_base 15: mod_base = OTHER; note = 2'-O-methoxyethyl modified thymine with phosphorothioate linkage
  modified_base 16: mod_base = OTHER; note = 2'-O-methoxyethyl modified thymine with phosphorothioate linkage
  modified_base 17: mod_base = OTHER; note = 2'-O-methoxyethyl modified nucleotide with phosphorothioate linkage
  modified_base 18: mod_base = OTHER; note = 2'-O-methoxyethyl modified thymine with phosphorothioate linkage
  modified_base 19: mod_base = OTHER; note = 2'-O-methoxyethyl modified thymine with phosphorothioate linkage
  modified_base 20: mod_base = OTHER; note = 2'-O-methoxyethyl modified thymine
cttcttgatctagcttgttt

SEQ ID NO: 157 - RNA, 20 nt, synthetic construct
  source 1..20: mol_type = other RNA
  modified_base 1: mod_base = OTHER; note = 2'-O-methoxyethyl modified thymine with phosphorothioate linkage
  modified_base 2: mod_base = OTHER; note = 2'-O-methoxyethyl modified nucleotide with phosphorothioate linkage
  modified_base 3: mod_base = OTHER; note = 2'-O-methoxyethyl modified nucleotide with phosphorothioate linkage
  modified_base 4: mod_base = OTHER; note = 2'-O-methoxyethyl modified thymine with phosphorothioate linkage
  modified_base 5: mod_base = OTHER; note = 2'-O-methoxyethyl 5-methylcytosine with phosphorothioate linkage
  modified_base 6: mod_base = OTHER; note = 2'-O-methoxyethyl modified thymine with phosphorothioate linkage
  modified_base 7: mod_base = OTHER; note = 2'-O-methoxyethyl modified nucleotide with phosphorothioate linkage
  modified_base 8: mod_base = OTHER; note = 2'-O-methoxyethyl modified nucleotide with phosphorothioate linkage
  modified_base 9: mod_base = OTHER; note = 2'-O-methoxyethyl 5-methylcytosine with phosphorothioate linkage
  modified_base 10: mod_base = OTHER; note = 2'-O-methoxyethyl modified thymine with phosphorothioate linkage
  modified_base 11: mod_base = OTHER; note = 2'-O-methoxyethyl modified thymine with phosphorothioate linkage
  modified_base 12: mod_base = OTHER; note = 2'-O-methoxyethyl modified nucleotide with phosphorothioate linkage
  modified_base 13: mod_base = OTHER; note = 2'-O-methoxyethyl modified thymine with phosphorothioate linkage
  modified_base 14: mod_base = OTHER; note = 2'-O-methoxyethyl modified thymine with phosphorothioate linkage
  modified_base 15: mod_base = OTHER; note = 2'-O-methoxyethyl modified thymine with phosphorothioate linkage
  modified_base 16: mod_base = OTHER; note = 2'-O-methoxyethyl modified nucleotide with phosphorothioate linkage
  modified_base 17: mod_base = OTHER; note = 2'-O-methoxyethyl modified thymine with phosphorothioate linkage
  modified_base 18: mod_base = OTHER; note = 2'-O-methoxyethyl modified nucleotide with phosphorothioate linkage
  modified_base 19: mod_base = OTHER; note = 2'-O-methoxyethyl modified nucleotide with phosphorothioate linkage
  modified_base 20: mod_base = OTHER; note = 2'-O-methoxyethyl 5-methylcytosine
tgatctagcttgtttgtggc

SEQ ID NO: 158 - RNA, 20 nt, synthetic construct
  source 1..20: mol_type = other RNA
  modified_base 1: mod_base = OTHER; note = 2'-O-methoxyethyl modified thymine with phosphorothioate linkage
  modified_base 2: mod_base = OTHER; note = 2'-O-methoxyethyl modified nucleotide with phosphorothioate linkage
  modified_base 3: mod_base = OTHER; note = 2'-O-methoxyethyl modified nucleotide with phosphorothioate linkage
  modified_base 4: mod_base = OTHER; note = 2'-O-methoxyethyl 5-methylcytosine with phosphorothioate linkage
  modified_base 5: mod_base = OTHER; note = 2'-O-methoxyethyl modified thymine with phosphorothioate linkage
  modified_base 6: mod_base = OTHER; note = 2'-O-methoxyethyl modified thymine with phosphorothioate linkage
  modified_base 7: mod_base = OTHER; note = 2'-O-methoxyethyl modified nucleotide with phosphorothioate linkage
  modified_base 8: mod_base = OTHER; note = 2'-O-methoxyethyl modified thymine with phosphorothioate linkage
  modified_base 9: mod_base = OTHER; note = 2'-O-methoxyethyl modified thymine with phosphorothioate linkage
  modified_base 10: mod_base = OTHER; note = 2'-O-methoxyethyl modified thymine with phosphorothioate linkage
  modified_base 11: mod_base = OTHER; note = 2'-O-methoxyethyl modified nucleotide with phosphorothioate linkage
  modified_base 12: mod_base = OTHER; note = 2'-O-methoxyethyl modified thymine with phosphorothioate linkage
  modified_base 13: mod_base = OTHER; note = 2'-O-methoxyethyl modified nucleotide with phosphorothioate linkage
  modified_base 14: mod_base = OTHER; note = 2'-O-methoxyethyl modified nucleotide with phosphorothioate linkage
  modified_base 15: mod_base = OTHER; note = 2'-O-methoxyethyl 5-methylcytosine with phosphorothioate linkage
  modified_base 16: mod_base = OTHER; note = 2'-O-methoxyethyl 5-methylcytosine with phosphorothioate linkage
  modified_base 17: mod_base = OTHER; note = 2'-O-methoxyethyl modified nucleotide with phosphorothioate linkage
  modified_base 18: mod_base = OTHER; note = 2'-O-methoxyethyl 5-methylcytosine with phosphorothioate linkage
  modified_base 19: mod_base = OTHER; note = 2'-O-methoxyethyl modified thymine with phosphorothioate linkage
  modified_base 20: mod_base = OTHER; note = 2'-O-methoxyethyl modified nucleotide
tagcttgtttgtggccactg

SEQ ID NO: 159 - RNA, 20 nt, synthetic construct
  source 1..20: mol_type = other RNA
  modified_base 1: mod_base = OTHER; note = 2'-O-methoxyethyl modified thymine with phosphorothioate linkage
  modified_base 2: mod_base = OTHER; note = 2'-O-methoxyethyl modified nucleotide with phosphorothioate linkage
  modified_base 3: mod_base = OTHER; note = 2'-O-methoxyethyl modified thymine with phosphorothioate linkage
  modified_base 4: mod_base = OTHER; note = 2'-O-methoxyethyl modified thymine with phosphorothioate linkage
  modified_base 5: mod_base = OTHER; note = 2'-O-methoxyethyl modified thymine with phosphorothioate linkage
  modified_base 6: mod_base = OTHER; note = 2'-O-methoxyethyl modified nucleotide with phosphorothioate linkage
  modified_base 7: mod_base = OTHER; note = 2'-O-methoxyethyl modified thymine with phosphorothioate linkage
  modified_base 8: mod_base = OTHER; note = 2'-O-methoxyethyl modified nucleotide with phosphorothioate linkage
  modified_base 9: mod_base = OTHER; note = 2'-O-methoxyethyl modified nucleotide with phosphorothioate linkage
  modified_base 10: mod_base = OTHER; note = 2'-O-methoxyethyl 5-methylcytosine with phosphorothioate linkage
  modified_base 11: mod_base = OTHER; note = 2'-O-methoxyethyl 5-methylcytosine with phosphorothioate linkage
  modified_base 12: mod_base = OTHER; note = 2'-O-methoxyethyl modified nucleotide with phosphorothioate linkage
  modified_base 13: mod_base = OTHER; note = 2'-O-methoxyethyl 5-methylcytosine with phosphorothioate linkage
  modified_base 14: mod_base = OTHER; note = 2'-O-methoxyethyl modified thymine with phosphorothioate linkage
  modified_base 15: mod_base = OTHER; note = 2'-O-methoxyethyl modified nucleotide with phosphorothioate linkage
  modified_base 16: mod_base = OTHER; note = 2'-O-methoxyethyl modified nucleotide with phosphorothioate linkage
  modified_base 17: mod_base = OTHER; note = 2'-O-methoxyethyl modified nucleotide with phosphorothioate linkage
  modified_base 18: mod_base = OTHER; note = 2'-O-methoxyethyl modified nucleotide with phosphorothioate linkage
  modified_base 19: mod_base = OTHER; note = 2'-O-methoxyethyl modified nucleotide with phosphorothioate linkage
  modified_base 20: mod_base = OTHER; note = 2'-O-methoxyethyl modified nucleotide
tgtttgtggccactggagag

SEQ ID NO: 160 - RNA, 20 nt, synthetic construct
  source 1..20: mol_type = other RNA
  modified_base 1: mod_base = OTHER; note = 2'-O-methoxyethyl modified nucleotide with phosphorothioate linkage
  modified_base 2: mod_base = OTHER; note = 2'-O-methoxyethyl modified thymine with phosphorothioate linkage
  modified_base 3: mod_base = OTHER; note = 2'-O-methoxyethyl modified nucleotide with phosphorothioate linkage
  modified_base 4: mod_base = OTHER; note = 2'-O-methoxyethyl modified nucleotide with phosphorothioate linkage
  modified_base 5: mod_base = OTHER; note = 2'-O-methoxyethyl 5-methylcytosine with phosphorothioate linkage
  modified_base 6: mod_base = OTHER; note = 2'-O-methoxyethyl 5-methylcytosine with phosphorothioate linkage
  modified_base 7: mod_base = OTHER; note = 2'-O-methoxyethyl modified nucleotide with phosphorothioate linkage
  modified_base 8: mod_base = OTHER; note = 2'-O-methoxyethyl 5-methylcytosine with phosphorothioate linkage
  modified_base 9: mod_base = OTHER; note = 2'-O-methoxyethyl modified thymine with phosphorothioate linkage
  modified_base 10: mod_base = OTHER; note = 2'-O-methoxyethyl modified nucleotide with phosphorothioate linkage
  modified_base 11: mod_base = OTHER; note = 2'-O-methoxyethyl modified nucleotide with phosphorothioate linkage
  modified_base 12: mod_base = OTHER; note = 2'-O-methoxyethyl modified nucleotide with phosphorothioate linkage
  modified_base 13: mod_base = OTHER; note = 2'-O-methoxyethyl modified nucleotide with phosphorothioate linkage
  modified_base 14: mod_base = OTHER; note = 2'-O-methoxyethyl modified nucleotide with phosphorothioate linkage
  modified_base 15: mod_base = OTHER; note = 2'-O-methoxyethyl modified nucleotide with phosphorothioate linkage
  modified_base 16: mod_base = OTHER; note = 2'-O-methoxyethyl modified thymine with phosphorothioate linkage
  modified_base 17: mod_base = OTHER; note = 2'-O-methoxyethyl 5-methylcytosine with phosphorothioate linkage
  modified_base 18: mod_base = OTHER; note = 2'-O-methoxyethyl 5-methylcytosine with phosphorothioate linkage
  modified_base 19: mod_base = OTHER; note = 2'-O-methoxyethyl 5-methylcytosine with phosphorothioate linkage
  modified_base 20: mod_base = OTHER; note = 2'-O-methoxyethyl modified thymine
gtggccactggagagtccct

SEQ ID NO: 161 - RNA, 20 nt, synthetic construct
  source 1..20: mol_type = other RNA
  modified_base 1: mod_base = OTHER; note = 2'-O-methoxyethyl 5-methylcytosine with phosphorothioate linkage
  modified_base 2: mod_base = OTHER; note = 2'-O-methoxyethyl modified nucleotide with phosphorothioate linkage
  modified_base 3: mod_base = OTHER; note = 2'-O-methoxyethyl 5-methylcytosine with phosphorothioate linkage
  modified_base 4: mod_base = OTHER; note = 2'-O-methoxyethyl modified thymine with phosphorothioate linkage
  modified_base 5: mod_base = OTHER; note = 2'-O-methoxyethyl modified nucleotide with phosphorothioate linkage
  modified_base 6: mod_base = OTHER; note = 2'-O-methoxyethyl modified nucleotide with phosphorothioate linkage
  modified_base 7: mod_base = OTHER; note = 2'-O-methoxyethyl modified nucleotide with phosphorothioate linkage
  modified_base 8: mod_base = OTHER; note = 2'-O-methoxyethyl modified nucleotide with phosphorothioate linkage
  modified_base 9: mod_base = OTHER; note = 2'-O-methoxyethyl modified nucleotide with phosphorothioate linkage
  modified_base 10: mod_base = OTHER; note = 2'-O-methoxyethyl modified nucleotide with phosphorothioate linkage
  modified_base 11: mod_base = OTHER; note = 2'-O-methoxyethyl modified thymine with phosphorothioate linkage
  modified_base 12: mod_base = OTHER; note = 2'-O-methoxyethyl 5-methylcytosine with phosphorothioate linkage
  modified_base 13: mod_base = OTHER; note = 2'-O-methoxyethyl 5-methylcytosine with phosphorothioate linkage
  modified_base 14: mod_base = OTHER; note = 2'-O-methoxyethyl 5-methylcytosine with phosphorothioate linkage
  modified_base 15: mod_base = OTHER; note = 2'-O-methoxyethyl modified thymine with phosphorothioate linkage
  modified_base 16: mod_base = OTHER; note = 2'-O-methoxyethyl modified nucleotide with phosphorothioate linkage
  modified_base 17: mod_base = OTHER; note = 2'-O-methoxyethyl modified nucleotide with phosphorothioate linkage
  modified_base 18: mod_base = OTHER; note = 2'-O-methoxyethyl modified nucleotide with phosphorothioate linkage
  modified_base 19: mod_base = OTHER; note = 2'-O-methoxyethyl modified thymine with phosphorothioate linkage
  modified_base 20: mod_base = OTHER; note = 2'-O-methoxyethyl modified nucleotide
cactggagagtccctggata

SEQ ID NO: 162 - RNA, 20 nt, synthetic construct
  source 1..20: mol_type = other RNA
  modified_base 1: mod_base = OTHER; note = 2'-O-methoxyethyl modified nucleotide with phosphorothioate linkage
  modified_base 2: mod_base = OTHER; note = 2'-O-methoxyethyl modified nucleotide with phosphorothioate linkage
  modified_base 3: mod_base = OTHER; note = 2'-O-methoxyethyl modified nucleotide with phosphorothioate linkage
  modified_base 4: mod_base = OTHER; note = 2'-O-methoxyethyl modified nucleotide with phosphorothioate linkage
  modified_base 5: mod_base = OTHER; note = 2'-O-methoxyethyl modified nucleotide with phosphorothioate linkage
  modified_base 6: mod_base = OTHER; note = 2'-O-methoxyethyl modified thymine with phosphorothioate linkage
  modified_base 7: mod_base = OTHER; note = 2'-O-methoxyethyl 5-methylcytosine with phosphorothioate linkage
  modified_base 8: mod_base = OTHER; note = 2'-O-methoxyethyl 5-methylcytosine with phosphorothioate linkage
  modified_base 9: mod_base = OTHER; note = 2'-O-methoxyethyl 5-methylcytosine with phosphorothioate linkage
  modified_base 10: mod_base = OTHER; note = 2'-O-methoxyethyl modified thymine with phosphorothioate linkage
  modified_base 11: mod_base = OTHER; note = 2'-O-methoxyethyl modified nucleotide with phosphorothioate linkage
  modified_base 12: mod_base = OTHER; note = 2'-O-methoxyethyl modified nucleotide with phosphorothioate linkage
  modified_base 13: mod_base = OTHER; note = 2'-O-methoxyethyl modified nucleotide with phosphorothioate linkage
  modified_base 14: mod_base = OTHER; note = 2'-O-methoxyethyl modified thymine with phosphorothioate linkage
  modified_base 15: mod_base = OTHER; note = 2'-O-methoxyethyl modified nucleotide with phosphorothioate linkage
  modified_base 16: mod_base = OTHER; note = 2'-O-methoxyethyl modified thymine with phosphorothioate linkage
  modified_base 17: mod_base = OTHER; note = 2'-O-methoxyethyl modified nucleotide with phosphorothioate linkage
  modified_base 18: mod_base = OTHER; note = 2'-O-methoxyethyl modified nucleotide with phosphorothioate linkage
  modified_base 19: mod_base = OTHER; note = 2'-O-methoxyethyl modified thymine with phosphorothioate linkage
  modified_base 20: mod_base = OTHER; note = 2'-O-methoxyethyl modified nucleotide
gagagtccctggatataatg

SEQ ID NO: 163 - RNA, 20 nt, synthetic construct
  source 1..20: mol_type = other RNA
  modified_base 1: mod_base = OTHER; note = 2'-O-methoxyethyl modified thymine with phosphorothioate linkage
  modified_base 2: mod_base = OTHER; note = 2'-O-methoxyethyl 5-methylcytosine with phosphorothioate linkage
  modified_base 3: mod_base = OTHER; note = 2'-O-methoxyethyl 5-methylcytosine with phosphorothioate linkage
  modified_base 4: mod_base = OTHER; note = 2'-O-methoxyethyl 5-methylcytosine with phosphorothioate linkage
  modified_base 5: mod_base = OTHER; note = 2'-O-methoxyethyl modified thymine with phosphorothioate linkage
  modified_base 6: mod_base = OTHER; note = 2'-O-methoxyethyl modified nucleotide with phosphorothioate linkage
  modified_base 7: mod_base = OTHER; note = 2'-O-methoxyethyl modified nucleotide with phosphorothioate linkage
  modified_base 8: mod_base = OTHER; note = 2'-O-methoxyethyl modified nucleotide with phosphorothioate linkage
  modified_base 9: mod_base = OTHER; note = 2'-O-methoxyethyl modified thymine with phosphorothioate linkage
  modified_base 10: mod_base = OTHER; note = 2'-O-methoxyethyl modified nucleotide with phosphorothioate linkage
  modified_base 11: mod_base = OTHER; note = 2'-O-methoxyethyl modified thymine with phosphorothioate linkage
  modified_base 12: mod_base = OTHER; note = 2'-O-methoxyethyl modified nucleotide with phosphorothioate linkage
  modified_base 13: mod_base = OTHER; note = 2'-O-methoxyethyl modified nucleotide with phosphorothioate linkage
  modified_base 14: mod_base = OTHER; note = 2'-O-methoxyethyl modified thymine with phosphorothioate linkage
  modified_base 15: mod_base = OTHER; note = 2'-O-methoxyethyl modified nucleotide with phosphorothioate linkage
  modified_base 16: mod_base = OTHER; note = 2'-O-methoxyethyl modified nucleotide with phosphorothioate linkage
  modified_base 17: mod_base = OTHER; note = 2'-O-methoxyethyl 5-methylcytosine with phosphorothioate linkage
  modified_base 18: mod_base = OTHER; note = 2'-O-methoxyethyl modified thymine with phosphorothioate linkage
  modified_base 19: mod_base = OTHER; note = 2'-O-methoxyethyl 5-methylcytosine with phosphorothioate linkage
  modified_base 20: mod_base = OTHER; note = 2'-O-methoxyethyl 5-methylcytosine
tccctggatataatggctcc

SEQ ID NO: 164 - RNA, 20 nt, synthetic construct
  source 1..20: mol_type = other RNA
  modified_base 1: mod_base = OTHER; note = 2'-O-methoxyethyl modified nucleotide with phosphorothioate linkage
  modified_base 2: mod_base = OTHER; note = 2'-O-methoxyethyl modified nucleotide with phosphorothioate linkage
  modified_base 3: mod_base = OTHER; note = 2'-O-methoxyethyl modified nucleotide with phosphorothioate linkage
  modified_base 4: mod_base = OTHER; note = 2'-O-methoxyethyl modified thymine with phosphorothioate linkage
  modified_base 5: mod_base = OTHER; note = 2'-O-methoxyethyl modified nucleotide with phosphorothioate linkage
  modified_base 6: mod_base = OTHER; note = 2'-O-methoxyethyl modified thymine with phosphorothioate linkage
  modified_base 7: mod_base = OTHER; note = 2'-O-methoxyethyl modified nucleotide with phosphorothioate linkage
  modified_base 8: mod_base = OTHER; note = 2'-O-methoxyethyl modified nucleotide with phosphorothioate linkage
  modified_base 9: mod_base = OTHER; note = 2'-O-methoxyethyl modified thymine with phosphorothioate linkage
  modified_base 10: mod_base = OTHER; note = 2'-O-methoxyethyl modified nucleotide with phosphorothioate linkage
  modified_base 11: mod_base = OTHER; note = 2'-O-methoxyethyl modified nucleotide with phosphorothioate linkage
  modified_base 12: mod_base = OTHER; note = 2'-O-methoxyethyl 5-methylcytosine with phosphorothioate linkage
  modified_base 13: mod_base = OTHER; note = 2'-O-methoxyethyl modified thymine with phosphorothioate linkage
  modified_base 14: mod_base = OTHER; note = 2'-O-methoxyethyl 5-methylcytosine with phosphorothioate linkage
  modified_base 15: mod_base = OTHER; note = 2'-O-methoxyethyl 5-methylcytosine with phosphorothioate linkage
  modified_base 16: mod_base = OTHER; note = 2'-O-methoxyethyl modified thymine with phosphorothioate linkage
  modified_base 17: mod_base = OTHER; note = 2'-O-methoxyethyl modified thymine with phosphorothioate linkage
  modified_base 18: mod_base = OTHER; note = 2'-O-methoxyethyl 5-methylcytosine with phosphorothioate linkage
  modified_base 19: mod_base = OTHER; note = 2'-O-methoxyethyl 5-methylcytosine with phosphorothioate linkage
  modified_base 20: mod_base = OTHER; note = 2'-O-methoxyethyl 5-methylcytosine
ggatataatggctccttccc

SEQ ID NO: 165 - RNA, 20 nt, synthetic construct
  source 1..20: mol_type = other RNA
  modified_base 1: mod_base = OTHER; note = 2'-O-methoxyethyl modified thymine with phosphorothioate linkage
  modified_base 2: mod_base = OTHER; note = 2'-O-methoxyethyl modified nucleotide with phosphorothioate linkage
  modified_base 3: mod_base = OTHER; note = 2'-O-methoxyethyl modified nucleotide with phosphorothioate linkage
  modified_base 4: mod_base = OTHER; note = 2'-O-methoxyethyl modified thymine with phosphorothioate linkage
  modified_base 5: mod_base = OTHER; note = 2'-O-methoxyethyl modified nucleotide with phosphorothioate linkage
  modified_base 6: mod_base = OTHER; note = 2'-O-methoxyethyl modified nucleotide with phosphorothioate linkage
  modified_base 7: mod_base = OTHER; note = 2'-O-methoxyethyl 5-methylcytosine with phosphorothioate linkage
  modified_base 8: mod_base = OTHER; note = 2'-O-methoxyethyl modified thymine with phosphorothioate linkage
  modified_base 9: mod_base = OTHER; note = 2'-O-methoxyethyl 5-methylcytosine with phosphorothioate linkage
  modified_base 10: mod_base = OTHER; note = 2'-O-methoxyethyl 5-methylcytosine with phosphorothioate linkage
  modified_base 11: mod_base = OTHER; note = 2'-O-methoxyethyl modified thymine with phosphorothioate linkage
  modified_base 12: mod_base = OTHER; note = 2'-O-methoxyethyl modified thymine with phosphorothioate linkage
  modified_base 13: mod_base = OTHER; note = 2'-O-methoxyethyl 5-methylcytosine with phosphorothioate linkage
  modified_base 14: mod_base = OTHER; note = 2'-O-methoxyethyl 5-methylcytosine with phosphorothioate linkage
  modified_base 15: mod_base = OTHER; note = 2'-O-methoxyethyl 5-methylcytosine with phosphorothioate linkage
  modified_base 16: mod_base = OTHER; note = 2'-O-methoxyethyl modified nucleotide with phosphorothioate linkage
  modified_base 17: mod_base = OTHER; note = 2'-O-methoxyethyl modified nucleotide with phosphorothioate linkage
  modified_base 18: mod_base = OTHER; note = 2'-O-methoxyethyl modified nucleotide with phosphorothioate linkage
  modified_base 19: mod_base = OTHER; note = 2'-O-methoxyethyl modified nucleotide with phosphorothioate linkage
  modified_base 20: mod_base = OTHER; note = 2'-O-methoxyethyl 5-methylcytosine
taatggctccttcccggaac

SEQ ID NO: 166 - RNA, 20 nt, synthetic construct
  source 1..20: mol_type = other RNA
  modified_base 1: mod_base = OTHER; note = 2'-O-methoxyethyl modified nucleotide with phosphorothioate linkage
  modified_base 2: mod_base = OTHER; note = 2'-O-methoxyethyl 5-methylcytosine with phosphorothioate linkage
  modified_base 3: mod_base = OTHER; note = 2'-O-methoxyethyl modified thymine with phosphorothioate linkage
  modified_base 4: mod_base = OTHER; note = 2'-O-methoxyethyl 5-methylcytosine with phosphorothioate linkage
  modified_base 5: mod_base = OTHER; note = 2'-O-methoxyethyl 5-methylcytosine with phosphorothioate linkage
  modified_base 6: mod_base = OTHER; note = 2'-O-methoxyethyl modified thymine with phosphorothioate linkage
  modified_base 7: mod_base = OTHER; note = 2'-O-methoxyethyl modified thymine with phosphorothioate linkage
  modified_base 8: mod_base = OTHER; note = 2'-O-methoxyethyl 5-methylcytosine with phosphorothioate linkage
  modified_base 9: mod_base = OTHER; note = 2'-O-methoxyethyl 5-methylcytosine with phosphorothioate linkage
  modified_base 10: mod_base = OTHER; note = 2'-O-methoxyethyl 5-methylcytosine with phosphorothioate linkage
  modified_base 11: mod_base = OTHER; note = 2'-O-methoxyethyl modified nucleotide with phosphorothioate linkage
  modified_base 12: mod_base = OTHER; note = 2'-O-methoxyethyl modified nucleotide with phosphorothioate linkage
  modified_base 13: mod_base = OTHER; note = 2'-O-methoxyethyl modified nucleotide with phosphorothioate linkage
  modified_base 14: mod_base = OTHER; note = 2'-O-methoxyethyl modified nucleotide with phosphorothioate linkage
  modified_base 15: mod_base = OTHER; note = 2'-O-methoxyethyl 5-methylcytosine with phosphorothioate linkage
  modified_base 16: mod_base = OTHER; note = 2'-O-methoxyethyl 5-methylcytosine with phosphorothioate linkage
  modified_base 17: mod_base = OTHER; note = 2'-O-methoxyethyl modified nucleotide with phosphorothioate linkage
  modified_base 18: mod_base = OTHER; note = 2'-O-methoxyethyl modified nucleotide with phosphorothioate linkage
  modified_base 19: mod_base = OTHER; note = 2'-O-methoxyethyl modified thymine with phosphorothioate linkage
  modified_base 20: mod_base = OTHER; note = 2'-O-methoxyethyl modified nucleotide
gctccttcccggaaccagta

SEQ ID NO: 167 - RNA, 20 nt, synthetic construct
  source 1..20: mol_type = other RNA
  modified_base 1: mod_base = OTHER; note = 2'-O-methoxyethyl modified thymine with phosphorothioate linkage
  modified_base 2: mod_base = OTHER; note = 2'-O-methoxyethyl modified thymine with phosphorothioate linkage
  modified_base 3: mod_base = OTHER; note = 2'-O-methoxyethyl 5-methylcytosine with phosphorothioate linkage
  modified_base 4: mod_base = OTHER; note = 2'-O-methoxyethyl 5-methylcytosine with phosphorothioate linkage
  modified_base 5: mod_base = OTHER; note = 2'-O-methoxyethyl 5-methylcytosine with phosphorothioate linkage
  modified_base 6: mod_base = OTHER; note = 2'-O-methoxyethyl modified nucleotide with phosphorothioate linkage
  modified_base 7: mod_base = OTHER; note = 2'-O-methoxyethyl modified nucleotide with phosphorothioate linkage
  modified_base 8: mod_base = OTHER; note = 2'-O-methoxyethyl modified nucleotide with phosphorothioate linkage
  modified_base 9: mod_base = OTHER; note = 2'-O-methoxyethyl modified nucleotide with phosphorothioate linkage
  modified_base 10: mod_base = OTHER; note = 2'-O-methoxyethyl 5-methylcytosine with phosphorothioate linkage
  modified_base 11: mod_base = OTHER; note = 2'-O-methoxyethyl 5-methylcytosine with phosphorothioate linkage
  modified_base 12: mod_base = OTHER; note = 2'-O-methoxyethyl modified nucleotide with phosphorothioate linkage
  modified_base 13: mod_base = OTHER; note = 2'-O-methoxyethyl modified nucleotide with phosphorothioate linkage
  modified_base 14: mod_base = OTHER; note = 2'-O-methoxyethyl modified thymine with phosphorothioate linkage
  modified_base 15: mod_base = OTHER; note = 2'-O-methoxyethyl modified nucleotide with phosphorothioate linkage
  modified_base 16: mod_base = OTHER; note = 2'-O-methoxyethyl modified nucleotide with phosphorothioate linkage
  modified_base 17: mod_base = OTHER; note = 2'-O-methoxyethyl 5-methylcytosine with phosphorothioate linkage
  modified_base 18: mod_base = OTHER; note = 2'-O-methoxyethyl 5-methylcytosine with phosphorothioate linkage
  modified_base 19: mod_base = OTHER; note = 2'-O-methoxyethyl modified nucleotide with phosphorothioate linkage
  modified_base 20: mod_base = OTHER; note = 2'-O-methoxyethyl modified thymine
ttcccggaaccagtaaccat

SEQ ID NO: 168 - RNA, 20 nt, synthetic construct
  source 1..20: mol_type = other RNA
  modified_base 1: mod_base = OTHER; note = 2'-O-methoxyethyl modified nucleotide with phosphorothioate linkage
  modified_base 2: mod_base = OTHER; note = 2'-O-methoxyethyl modified nucleotide with phosphorothioate linkage
  modified_base 3: mod_base = OTHER; note = 2'-O-methoxyethyl modified nucleotide with phosphorothioate linkage
  modified_base 4: mod_base = OTHER; note = 2'-O-methoxyethyl modified nucleotide with phosphorothioate linkage
  modified_base 5: mod_base = OTHER; note = 2'-O-methoxyethyl 5-methylcytosine with phosphorothioate linkage
  modified_base 6: mod_base = OTHER; note = 2'-O-methoxyethyl 5-methylcytosine with phosphorothioate linkage
  modified_base 7: mod_base = OTHER; note = 2'-O-methoxyethyl modified nucleotide with phosphorothioate linkage
  modified_base 8: mod_base = OTHER; note = 2'-O-methoxyethyl modified nucleotide with phosphorothioate linkage
  modified_base 9: mod_base = OTHER; note = 2'-O-methoxyethyl modified thymine with phosphorothioate linkage
  modified_base 10: mod_base = OTHER; note = 2'-O-methoxyethyl modified nucleotide with phosphorothioate linkage
  modified_base 11: mod_base = OTHER; note = 2'-O-methoxyethyl modified nucleotide with phosphorothioate linkage
  modified_base 12: mod_base = OTHER; note = 2'-O-methoxyethyl 5-methylcytosine with phosphorothioate linkage
  modified_base 13: mod_base = OTHER; note = 2'-O-methoxyethyl 5-methylcytosine with phosphorothioate linkage
  modified_base 14: mod_base = OTHER; note = 2'-O-methoxyethyl modified nucleotide with phosphorothioate linkage
  modified_base 15: mod_base = OTHER; note = 2'-O-methoxyethyl modified thymine with phosphorothioate linkage
  modified_base 16: mod_base = OTHER; note = 2'-O-methoxyethyl modified nucleotide with phosphorothioate linkage
  modified_base 17: mod_base = OTHER; note = 2'-O-methoxyethyl modified nucleotide with phosphorothioate linkage
  modified_base 18: mod_base = OTHER; note = 2'-O-methoxyethyl modified nucleotide with phosphorothioate linkage
  modified_base 19: mod_base = OTHER; note = 2'-O-methoxyethyl 5-methylcytosine with phosphorothioate linkage
  modified_base 20: mod_base = OTHER; note = 2'-O-methoxyethyl modified thymine
ggaaccagtaaccatgaact

SEQ ID NO: 169 - RNA, 20 nt, synthetic construct
  source 1..20: mol_type = other RNA
  modified_base 1: mod_base = OTHER; note = 2'-O-methoxyethyl 5-methylcytosine with phosphorothioate linkage
  modified_base 2: mod_base = OTHER; note = 2'-O-methoxyethyl modified nucleotide with phosphorothioate linkage
  modified_base 3: mod_base = OTHER; note = 2'-O-methoxyethyl modified nucleotide with phosphorothioate linkage
  modified_base 4: mod_base = OTHER; note = 2'-O-methoxyethyl modified thymine with phosphorothioate linkage
  modified_base 5: mod_base = OTHER; note = 2'-O-methoxyethyl modified nucleotide with phosphorothioate linkage
  modified_base 6: mod_base = OTHER; note = 2'-O-methoxyethyl modified nucleotide with phosphorothioate linkage
  modified_base 7: mod_base = OTHER; note = 2'-O-methoxyethyl 5-methylcytosine with phosphorothioate linkage
  modified_base 8: mod_base = OTHER; note = 2'-O-methoxyethyl 5-methylcytosine with phosphorothioate linkage
  modified_base 9: mod_base = OTHER; note = 2'-O-methoxyethyl modified nucleotide with phosphorothioate linkage
  modified_base 10: mod_base = OTHER; note = 2'-O-methoxyethyl modified thymine with phosphorothioate linkage
  modified_base 11: mod_base = OTHER; note = 2'-O-methoxyethyl modified nucleotide with phosphorothioate linkage
  modified_base 12: mod_base = OTHER; note = 2'-O-methoxyethyl modified nucleotide with phosphorothioate linkage
  modified_base 13: mod_base = OTHER; note = 2'-O-methoxyethyl modified nucleotide with phosphorothioate linkage
  modified_base 14: mod_base = OTHER; note = 2'-O-methoxyethyl 5-methylcytosine with phosphorothioate linkage
  modified_base 15: mod_base = OTHER; note = 2'-O-methoxyethyl modified thymine with phosphorothioate linkage
  modified_base 16: mod_base = OTHER; note = 2'-O-methoxyethyl modified nucleotide with phosphorothioate linkage
  modified_base 17: mod_base = OTHER; note = 2'-O-methoxyethyl modified nucleotide with phosphorothioate linkage
  modified_base 18: mod_base = OTHER; note = 2'-O-methoxyethyl modified nucleotide with phosphorothioate linkage
  modified_base 19: mod_base = OTHER; note = 2'-O-methoxyethyl modified nucleotide with phosphorothioate linkage
  modified_base 20: mod_base = OTHER; note = 2'-O-methoxyethyl modified nucleotide
cagtaaccatgaactgggga

SEQ ID NO: 170 - RNA, 20 nt, synthetic construct
  source 1..20: mol_type = other RNA
  modified_base 1: mod_base = OTHER; note = 2'-O-methoxyethyl modified nucleotide with phosphorothioate linkage
  modified_base 2: mod_base = OTHER; note = 2'-O-methoxyethyl 5-methylcytosine with phosphorothioate linkage
  modified_base 3: mod_base = OTHER; note = 2'-O-methoxyethyl 5-methylcytosine with phosphorothioate linkage
  modified_base 4: mod_base = OTHER; note = 2'-O-methoxyethyl modified nucleotide with phosphorothioate linkage
  modified_base 5: mod_base = OTHER; note = 2'-O-methoxyethyl modified thymine with phosphorothioate linkage
  modified_base 6: mod_base = OTHER; note = 2'-O-methoxyethyl modified nucleotide with phosphorothioate linkage
  modified_base 7: mod_base = OTHER; note = 2'-O-methoxyethyl modified nucleotide with phosphorothioate linkage
  modified_base 8: mod_base = OTHER; note = 2'-O-methoxyethyl modified nucleotide with phosphorothioate linkage
  modified_base 9: mod_base = OTHER; note = 2'-O-methoxyethyl 5-methylcytosine with phosphorothioate linkage
  modified_base 10: mod_base = OTHER; note = 2'-O-methoxyethyl modified thymine with phosphorothioate linkage
  modified_base 11: mod_base = OTHER; note = 2'-O-methoxyethyl modified nucleotide with phosphorothioate linkage
  modified_base 12: mod_base = OTHER; note = 2'-O-methoxyethyl modified nucleotide with phosphorothioate linkage
  modified_base 13: mod_base = OTHER; note = 2'-O-methoxyethyl modified nucleotide with phosphorothioate linkage
  modified_base 14: mod_base = OTHER; note = 2'-O-methoxyethyl modified nucleotide with phosphorothioate linkage
  modified_base 15: mod_base = OTHER; note = 2'-O-methoxyethyl modified nucleotide with phosphorothioate linkage
  modified_base 16: mod_base = OTHER; note = 2'-O-methoxyethyl modified nucleotide with phosphorothioate linkage
  modified_base 17: mod_base = OTHER; note = 2'-O-methoxyethyl modified thymine with phosphorothioate linkage
  modified_base 18: mod_base = OTHER; note = 2'-O-methoxyethyl modified thymine with phosphorothioate linkage
  modified_base 19: mod_base = OTHER; note = 2'-O-methoxyethyl 5-methylcytosine with phosphorothioate linkage
  modified_base 20: mod_base = OTHER; note = 2'-O-methoxyethyl modified thymine
accatgaactggggagttct

SEQ ID NO: 171 - RNA, 20 nt, synthetic construct
  source 1..20: mol_type = other RNA
  modified_base 1: mod_base = OTHER; note = 2'-O-methoxyethyl modified nucleotide with phosphorothioate linkage
  modified_base 2: mod_base = OTHER; note = 2'-O-methoxyethyl modified nucleotide with phosphorothioate linkage
  modified_base 3: mod_base = OTHER; note = 2'-O-methoxyethyl modified nucleotide with phosphorothioate linkage
  modified_base 4: mod_base = OTHER; note = 2'-O-methoxyethyl 5-methylcytosine with phosphorothioate linkage
  modified_base 5: mod_base = OTHER; note = 2'-O-methoxyethyl modified thymine with phosphorothioate linkage
  modified_base 6: mod_base = OTHER; note = 2'-O-methoxyethyl modified nucleotide with phosphorothioate linkage
  modified_base 7: mod_base = OTHER; note = 2'-O-methoxyethyl modified nucleotide with phosphorothioate linkage
  modified_base 8: mod_base = OTHER; note = 2'-O-methoxyethyl modified nucleotide with phosphorothioate linkage
  modified_base 9: mod_base = OTHER; note = 2'-O-methoxyethyl modified nucleotide with phosphorothioate linkage
  modified_base 10: mod_base = OTHER; note = 2'-O-methoxyethyl modified nucleotide with phosphorothioate linkage
  modified_base 11: mod_base = OTHER; note = 2'-O-methoxyethyl modified nucleotide with phosphorothioate linkage
  modified_base 12: mod_base = OTHER; note = 2'-O-methoxyethyl modified thymine with phosphorothioate linkage
  modified_base 13: mod_base = OTHER; note = 2'-O-methoxyethyl modified thymine with phosphorothioate linkage
  modified_base 14: mod_base = OTHER; note = 2'-O-methoxyethyl 5-methylcytosine with phosphorothioate linkage
  modified_base 15: mod_base = OTHER; note = 2'-O-methoxyethyl modified thymine with phosphorothioate linkage
  modified_base 16: mod_base = OTHER; note = 2'-O-methoxyethyl modified thymine with phosphorothioate linkage
  modified_base 17: mod_base = OTHER; note = 2'-O-methoxyethyl modified nucleotide with phosphorothioate linkage
  modified_base 18: mod_base = OTHER; note = 2'-O-methoxyethyl modified thymine with phosphorothioate linkage
  modified_base 19: mod_base = OTHER; note = 2'-O-methoxyethyl 5-methylcytosine with phosphorothioate linkage
  modified_base 20: mod_base = OTHER; note = 2'-O-methoxyethyl modified nucleotide
gaactggggagttcttgtcg

SEQ ID NO: 172 - RNA, 20 nt, synthetic construct
  source 1..20: mol_type = other RNA
  modified_base 1: mod_base = OTHER; note = 2'-O-methoxyethyl modified nucleotide with phosphorothioate linkage
  modified_base 2: mod_base = OTHER; note = 2'-O-methoxyethyl modified nucleotide with phosphorothioate linkage
  modified_base 3: mod_base = OTHER; note = 2'-O-methoxyethyl modified nucleotide with phosphorothioate linkage
  modified_base 4: mod_base = OTHER; note = 2'-O-methoxyethyl modified nucleotide with phosphorothioate linkage
  modified_base 5: mod_base = OTHER; note = 2'-O-methoxyethyl modified nucleotide with phosphorothioate linkage
  modified_base 6: mod_base = OTHER; note = 2'-O-methoxyethyl modified nucleotide with phosphorothioate linkage
  modified_base 7: mod_base = OTHER; note = 2'-O-methoxyethyl modified thymine with phosphorothioate linkage
  modified_base 8: mod_base = OTHER; note = 2'-O-methoxyethyl modified thymine with phosphorothioate linkage
  modified_base 9: mod_base = OTHER; note = 2'-O-methoxyethyl 5-methylcytosine with phosphorothioate linkage
  modified_base 10: mod_base = OTHER; note = 2'-O-methoxyethyl modified thymine with phosphorothioate linkage
  modified_base 11: mod_base = OTHER; note = 2'-O-methoxyethyl modified thymine with phosphorothioate linkage
  modified_base 12: mod_base = OTHER; note = 2'-O-methoxyethyl modified nucleotide with phosphorothioate linkage
  modified_base 13: mod_base = OTHER; note = 2'-O-methoxyethyl modified thymine with phosphorothioate linkage
  modified_base 14: mod_base = OTHER; note = 2'-O-methoxyethyl 5-methylcytosine with phosphorothioate linkage
  modified_base 15: mod_base = OTHER; note = 2'-O-methoxyethyl modified nucleotide with phosphorothioate linkage
  modified_base 16: mod_base = OTHER; note = 2'-O-methoxyethyl modified thymine with phosphorothioate linkage
  modified_base 17: mod_base = OTHER; note = 2'-O-methoxyethyl modified nucleotide with phosphorothioate linkage
  modified_base 18: mod_base = OTHER; note = 2'-O-methoxyethyl modified nucleotide with phosphorothioate linkage
  modified_base 19: mod_base = OTHER; note = 2'-O-methoxyethyl modified thymine with phosphorothioate linkage
  modified_base 20: mod_base = OTHER; note = 2'-O-methoxyethyl modified nucleotide
ggggagttcttgtcgtagta

SEQ ID NO: 173 - RNA, 20 nt, synthetic construct
  source 1..20: mol_type = other RNA
  modified_base 1: mod_base = OTHER; note = 2'-O-methoxyethyl modified nucleotide with phosphorothioate linkage
  modified_base 2: mod_base = OTHER; note = 2'-O-methoxyethyl modified thymine with phosphorothioate linkage
  modified_base 3: mod_base = OTHER; note = 2'-O-methoxyethyl modified thymine with phosphorothioate linkage
  modified_base 4: mod_base = OTHER; note = 2'-O-methoxyethyl 5-methylcytosine with phosphorothioate linkage
  modified_base 5: mod_base = OTHER; note = 2'-O-methoxyethyl modified thymine with phosphorothioate linkage
  modified_base 6: mod_base = OTHER; note = 2'-O-methoxyethyl modified thymine with phosphorothioate linkage
  modified_base 7: mod_base = OTHER; note = 2'-O-methoxyethyl modified nucleotide with phosphorothioate linkage
  modified_base 8: mod_base = OTHER; note = 2'-O-methoxyethyl modified thymine with phosphorothioate linkage
  modified_base 9: mod_base = OTHER; note = 2'-O-methoxyethyl 5-methylcytosine with phosphorothioate linkage
  modified_base 10: mod_base = OTHER; note = 2'-O-methoxyethyl modified nucleotide with phosphorothioate linkage
  modified_base 11: mod_base = OTHER; note = 2'-O-methoxyethyl modified thymine with phosphorothioate linkage
  modified_base 12: mod_base = OTHER; note = 2'-O-methoxyethyl modified nucleotide with phosphorothioate linkage
  modified_base 13: mod_base = OTHER; note = 2'-O-methoxyethyl modified nucleotide with phosphorothioate linkage
  modified_base 14: mod_base = OTHER; note = 2'-O-methoxyethyl modified thymine with phosphorothioate linkage
  modified_base 15: mod_base = OTHER; note = 2'-O-methoxyethyl modified nucleotide with phosphorothioate linkage
  modified_base 16: mod_base = OTHER; note = 2'-O-methoxyethyl modified nucleotide with phosphorothioate linkage
  modified_base 17: mod_base = OTHER; note = 2'-O-methoxyethyl modified nucleotide with phosphorothioate linkage
  modified_base 18: mod_base = OTHER; note = 2'-O-methoxyethyl modified nucleotide with phosphorothioate linkage
  modified_base 19: mod_base = OTHER; note = 2'-O-methoxyethyl modified thymine with phosphorothioate linkage
  modified_base 20: mod_base = OTHER; note = 2'-O-methoxyethyl modified nucleotide
gttcttgtcgtagtagggta

SEQ ID NO: 174 - RNA, 20 nt, synthetic construct
  source 1..20: mol_type = other RNA
  modified_base 1: mod_base = OTHER; note = 2'-O-methoxyethyl modified thymine with phosphorothioate linkage
  modified_base 2: mod_base = OTHER; note = 2'-O-methoxyethyl modified nucleotide with phosphorothioate linkage
  modified_base 3: mod_base = OTHER; note = 2'-O-methoxyethyl modified thymine with phosphorothioate linkage
  modified_base 4: mod_base = OTHER; note = 2'-O-methoxyethyl 5-methylcytosine with phosphorothioate linkage
  modified_base 5: mod_base = OTHER; note = 2'-O-methoxyethyl modified nucleotide with phosphorothioate linkage
  modified_base 6: mod_base = OTHER; note = 2'-O-methoxyethyl modified thymine with phosphorothioate linkage
  modified_base 7: mod_base = OTHER; note = 2'-O-methoxyethyl modified nucleotide with phosphorothioate linkage
  modified_base 8: mod_base = OTHER; note = 2'-O-methoxyethyl modified nucleotide with phosphorothioate linkage
  modified_base 9: mod_base = OTHER; note = 2'-O-methoxyethyl modified thymine with phosphorothioate linkage
  modified_base 10: mod_base = OTHER; note = 2'-O-methoxyethyl modified nucleotide with phosphorothioate linkage
  modified_base 11: mod_base = OTHER; note = 2'-O-methoxyethyl modified nucleotide with phosphorothioate linkage
  modified_base 12: mod_base = OTHER; note = 2'-O-methoxyethyl modified nucleotide with phosphorothioate linkage
  modified_base 13: mod_base = OTHER; note = 2'-O-methoxyethyl modified nucleotide with phosphorothioate linkage
  modified_base 14: mod_base = OTHER; note = 2'-O-methoxyethyl modified thymine with phosphorothioate linkage
  modified_base 15: mod_base = OTHER; note = 2'-O-methoxyethyl modified nucleotide with phosphorothioate linkage
  modified_base 16: mod_base = OTHER; note = 2'-O-methoxyethyl modified thymine with phosphorothioate linkage
  modified_base 17: mod_base = OTHER; note = 2'-O-methoxyethyl modified nucleotide with phosphorothioate linkage
  modified_base 18: mod_base = OTHER; note = 2'-O-methoxyethyl modified nucleotide with phosphorothioate linkage
  modified_base 19: mod_base = OTHER; note = 2'-O-methoxyethyl modified nucleotide with phosphorothioate linkage
  modified_base 20: mod_base = OTHER; note = 2'-O-methoxyethyl modified nucleotide
tgtcgtagtagggtatggga

SEQ ID NO: 175 - RNA, 20 nt, synthetic construct
  source 1..20: mol_type = other RNA
  modified_base 1: mod_base = OTHER; note = 2'-O-methoxyethyl modified thymine with phosphorothioate linkage
  modified_base 2: mod_base = OTHER; note = 2'-O-methoxyethyl modified nucleotide with phosphorothioate linkage
  modified_base 3: mod_base = OTHER; note = 2'-O-methoxyethyl modified nucleotide with phosphorothioate linkage
  modified_base 4: mod_base = OTHER; note = 2'-O-methoxyethyl modified thymine with phosphorothioate linkage
  modified_base 5: mod_base = OTHER; note = 2'-O-methoxyethyl modified nucleotide with phosphorothioate linkage
  modified_base 6: mod_base = OTHER; note = 2'-O-methoxyethyl modified nucleotide with phosphorothioate linkage
  modified_base 7: mod_base = OTHER; note = 2'-O-methoxyethyl modified nucleotide with phosphorothioate linkage
  modified_base 8: mod_base = OTHER; note = 2'-O-methoxyethyl modified nucleotide with phosphorothioate linkage
  modified_base 9: mod_base = OTHER; note = 2'-O-methoxyethyl modified thymine with phosphorothioate linkage
  modified_base 10: mod_base = OTHER; note = 2'-O-methoxyethyl modified nucleotide with phosphorothioate linkage
  modified_base 11: mod_base = OTHER; note = 2'-O-methoxyethyl modified thymine with phosphorothioate linkage
  modified_base 12: mod_base = OTHER; note = 2'-O-methoxyethyl modified nucleotide with phosphorothioate linkage
  modified_base 13: mod_base = OTHER; note = 2'-O-methoxyethyl modified nucleotide with phosphorothioate linkage
  modified_base 14: mod_base = OTHER; note = 2'-O-methoxyethyl modified nucleotide with phosphorothioate linkage
  modified_base 15: mod_base = OTHER; note = 2'-O-methoxyethyl modified nucleotide with phosphorothioate linkage
  modified_base 16: mod_base = OTHER; note = 2'-O-methoxyethyl modified thymine with phosphorothioate linkage
  modified_base 17: mod_base = OTHER; note = 2'-O-methoxyethyl modified nucleotide with phosphorothioate linkage
  modified_base 18: mod_base = OTHER; note = 2'-O-methoxyethyl modified nucleotide with phosphorothioate linkage
  modified_base 19: mod_base = OTHER; note = 2'-O-methoxyethyl modified nucleotide with phosphorothioate linkage
  modified_base 20: mod_base = OTHER; note = 2'-O-methoxyethyl modified nucleotide
tagtagggtatgggatggaa

SEQ ID NO: 176 - RNA, 20 nt, synthetic construct
  source 1..20: mol_type = other RNA
  modified_base 1: mod_base = OTHER; note = 2'-O-methoxyethyl modified nucleotide with phosphorothioate linkage
  modified_base 2: mod_base = OTHER; note = 2'-O-methoxyethyl modified nucleotide with phosphorothioate linkage
  modified_base 3: mod_base = OTHER; note = 2'-O-methoxyethyl modified nucleotide with phosphorothioate linkage
  modified_base 4: mod_base = OTHER; note = 2'-O-methoxyethyl modified thymine with phosphorothioate linkage
  modified_base 5: mod_base = OTHER; note = 2'-O-methoxyethyl modified nucleotide with phosphorothioate linkage
  modified_base 6: mod_base = OTHER; note = 2'-O-methoxyethyl modified thymine with phosphorothioate linkage
  modified_base 7: mod_base = OTHER; note = 2'-O-methoxyethyl modified nucleotide with phosphorothioate linkage
  modified_base 8: mod_base = OTHER; note = 2'-O-methoxyethyl modified nucleotide with phosphorothioate linkage
  modified_base 9: mod_base = OTHER; note = 2'-O-methoxyethyl modified nucleotide with phosphorothioate linkage
  modified_base 10: mod_base = OTHER; note = 2'-O-methoxyethyl modified nucleotide with phosphorothioate linkage
  modified_base 11: mod_base = OTHER; note = 2'-O-methoxyethyl modified thymine with phosphorothioate linkage
  modified_base 12: mod_base = OTHER; note = 2'-O-methoxyethyl modified nucleotide with phosphorothioate linkage
  modified_base 13: mod_base = OTHER; note = 2'-O-methoxyethyl modified nucleotide with phosphorothioate linkage
  modified_base 14: mod_base = OTHER; note = 2'-O-methoxyethyl modified nucleotide with phosphorothioate linkage
  modified_base 15: mod_base = OTHER; note = 2'-O-methoxyethyl modified nucleotide with phosphorothioate linkage
  modified_base 16: mod_base = OTHER; note = 2'-O-methoxyethyl modified nucleotide with phosphorothioate linkage
  modified_base 17: mod_base = OTHER; note = 2'-O-methoxyethyl modified nucleotide with phosphorothioate linkage
  modified_base 18: mod_base = OTHER; note = 2'-O-methoxyethyl modified nucleotide with phosphorothioate linkage
  modified_base 19: mod_base = OTHER; note = 2'-O-methoxyethyl modified nucleotide with phosphorothioate linkage
  modified_base 20: mod_base = OTHER; note = 2'-O-methoxyethyl modified nucleotide
gggtatgggatggaagaaag

SEQ ID NO: 177 - RNA, 20 nt, synthetic construct
  source 1..20: mol_type = other RNA
  modified_base 1: mod_base = OTHER; note = 2'-O-methoxyethyl modified thymine with phosphorothioate linkage
  modified_base 2: mod_base = OTHER; note = 2'-O-methoxyethyl modified nucleotide with phosphorothioate linkage
  modified_base 3: mod_base = OTHER; note = 2'-O-methoxyethyl modified nucleotide with phosphorothioate linkage
  modified_base 4: mod_base = OTHER; note = 2'-O-methoxyethyl modified nucleotide with phosphorothioate linkage
  modified_base 5: mod_base = OTHER; note = 2'-O-methoxyethyl modified nucleotide with phosphorothioate linkage
  modified_base 6: mod_base = OTHER; note = 2'-O-methoxyethyl modified thymine with phosphorothioate linkage
  modified_base 7: mod_base = OTHER; note = 2'-O-methoxyethyl modified nucleotide with phosphorothioate linkage
  modified_base 8: mod_base = OTHER; note = 2'-O-methoxyethyl modified nucleotide with phosphorothioate linkage
  modified_base 9: mod_base = OTHER; note = 2'-O-methoxyethyl modified nucleotide with phosphorothioate linkage
  modified_base 10: mod_base = OTHER; note = 2'-O-methoxyethyl modified nucleotide with phosphorothioate linkage
  modified_base 11: mod_base = OTHER; note = 2'-O-methoxyethyl modified nucleotide with phosphorothioate linkage
  modified_base 12: mod_base = OTHER; note = 2'-O-methoxyethyl modified nucleotide with phosphorothioate linkage
  modified_base 13: mod_base = OTHER; note = 2'-O-methoxyethyl modified nucleotide with phosphorothioate linkage
  modified_base 14: mod_base = OTHER; note = 2'-O-methoxyethyl modified nucleotide with phosphorothioate linkage
  modified_base 15: mod_base = OTHER; note = 2'-O-methoxyethyl modified nucleotide with phosphorothioate linkage
  modified_base 16: mod_base = OTHER; note = 2'-O-methoxyethyl modified thymine with phosphorothioate linkage
  modified_base 17: mod_base = OTHER; note = 2'-O-methoxyethyl modified nucleotide with phosphorothioate linkage
  modified_base 18: mod_base = OTHER; note = 2'-O-methoxyethyl 5-methylcytosine with phosphorothioate linkage
  modified_base 19: mod_base = OTHER; note = 2'-O-methoxyethyl modified nucleotide with phosphorothioate linkage
  modified_base 20: mod_base = OTHER; note = 2'-O-methoxyethyl modified nucleotide
tgggatggaagaaagtgcag

SEQ ID NO: 178 - RNA, 20 nt, synthetic construct
  source 1..20: mol_type = other RNA
  modified_base 1: mod_base = OTHER; note = 2'-O-methoxyethyl modified thymine with phosphorothioate linkage
  modified_base 2: mod_base = OTHER; note = 2'-O-methoxyethyl modified nucleotide with phosphorothioate linkage
  modified_base 3: mod_base = OTHER; note = 2'-O-methoxyethyl modified nucleotide with phosphorothioate linkage
  modified_base 4: mod_base = OTHER; note = 2'-O-methoxyethyl modified nucleotide with phosphorothioate linkage
  modified_base 5: mod_base = OTHER; note = 2'-O-methoxyethyl modified nucleotide with phosphorothioate linkage
  modified_base 6: mod_base = OTHER; note = 2'-O-methoxyethyl modified nucleotide with phosphorothioate linkage
  modified_base 7: mod_base = OTHER; note = 2'-O-methoxyethyl modified nucleotide with phosphorothioate linkage
  modified_base 8: mod_base = OTHER; note = 2'-O-methoxyethyl modified nucleotide with phosphorothioate linkage
  modified_base 9: mod_base = OTHER; note = 2'-O-methoxyethyl modified nucleotide with phosphorothioate linkage
  modified_base 10: mod_base = OTHER; note = 2'-O-methoxyethyl modified nucleotide with phosphorothioate linkage
  modified_base 11: mod_base = OTHER; note = 2'-O-methoxyethyl modified thymine with phosphorothioate linkage
  modified_base 12: mod_base = OTHER; note = 2'-O-methoxyethyl modified nucleotide with phosphorothioate linkage
  modified_base 13: mod_base = OTHER; note = 2'-O-methoxyethyl 5-methylcytosine with phosphorothioate linkage
  modified_base 14: mod_base = OTHER; note = 2'-O-methoxyethyl modified nucleotide with phosphorothioate linkage
  modified_base 15: mod_base = OTHER; note = 2'-O-methoxyethyl modified nucleotide with phosphorothioate linkage
  modified_base 16: mod_base = OTHER; note = 2'-O-methoxyethyl modified nucleotide with phosphorothioate linkage
  modified_base 17: mod_base = OTHER; note = 2'-O-methoxyethyl modified nucleotide with phosphorothioate linkage
  modified_base 18: mod_base = OTHER; note = 2'-O-methoxyethyl 5-methylcytosine with phosphorothioate linkage
  modified_base 19: mod_base = OTHER; note = 2'-O-methoxyethyl modified nucleotide with phosphorothioate linkage
  modified_base 20: mod_base = OTHER; note = 2'-O-methoxyethyl 5-methylcytosine
tggaagaaagtgcagggcac

SEQ ID NO: 179 - RNA, 20 nt, synthetic construct
  source 1..20: mol_type = other RNA
  modified_base 1: mod_base = OTHER; note = 2'-O-methoxyethyl modified nucleotide with phosphorothioate linkage
  modified_base 2: mod_base = OTHER; note = 2'-O-methoxyethyl modified nucleotide with phosphorothioate linkage
  modified_base 3: mod_base = OTHER; note = 2'-O-methoxyethyl modified nucleotide with phosphorothioate linkage
  modified_base 4: mod_base = OTHER; note = 2'-O-methoxyethyl modified nucleotide with phosphorothioate linkage
  modified_base 5: mod_base = OTHER; note = 2'-O-methoxyethyl modified nucleotide with phosphorothioate linkage
  modified_base 6: mod_base = OTHER; note = 2'-O-methoxyethyl modified thymine with phosphorothioate linkage
  modified_base 7: mod_base = OTHER; note = 2'-O-methoxyethyl modified nucleotide with phosphorothioate linkage
  modified_base 8: mod_base = OTHER; note = 2'-O-methoxyethyl 5-methylcytosine with phosphorothioate linkage
  modified_base 9: mod_base = OTHER; note = 2'-O-methoxyethyl modified nucleotide with phosphorothioate linkage
  modified_base 10: mod_base = OTHER; note = 2'-O-methoxyethyl modified nucleotide with phosphorothioate linkage
  modified_base 11: mod_base = OTHER; note = 2'-O-methoxyethyl modified nucleotide with phosphorothioate linkage
  modified_base 12: mod_base = OTHER; note = 2'-O-methoxyethyl modified nucleotide with phosphorothioate linkage
  modified_base 13: mod_base = OTHER; note = 2'-O-methoxyethyl 5-methylcytosine with phosphorothioate linkage
  modified_base 14: mod_base = OTHER; note = 2'-O-methoxyethyl modified nucleotide with phosphorothioate linkage
  modified_base 15: mod_base = OTHER; note = 2'-O-methoxyethyl 5-methylcytosine with phosphorothioate linkage
  modified_base 16: mod_base = OTHER; note = 2'-O-methoxyethyl modified nucleotide with phosphorothioate linkage
  modified_base 17: mod_base = OTHER; note = 2'-O-methoxyethyl modified nucleotide with phosphorothioate linkage
  modified_base 18: mod_base = OTHER; note = 2'-O-methoxyethyl modified nucleotide with phosphorothioate linkage
  modified_base 19: mod_base = OTHER; note = 2'-O-methoxyethyl modified nucleotide with phosphorothioate linkage
  modified_base 20: mod_base = OTHER; note = 2'-O-methoxyethyl modified nucleotide
gaaagtgcagggcacgagga

SEQ ID NO: 180 - RNA, 20 nt, synthetic construct
  source 1..20: mol_type = other RNA
  modified_base 1: mod_base = OTHER; note = 2'-O-methoxyethyl modified thymine with phosphorothioate linkage
  modified_base 2: mod_base = OTHER; note = 2'-O-methoxyethyl modified nucleotide with phosphorothioate linkage
  modified_base 3: mod_base = OTHER; note = 2'-O-methoxyethyl 5-methylcytosine with phosphorothioate linkage
  modified_base 4: mod_base = OTHER; note = 2'-O-methoxyethyl modified nucleotide with phosphorothioate linkage
  modified_base 5: mod_base = OTHER; note = 2'-O-methoxyethyl modified nucleotide with phosphorothioate linkage
  modified_base 6: mod_base = OTHER; note = 2'-O-methoxyethyl modified nucleotide with phosphorothioate linkage
  modified_base 7: mod_base = OTHER; note = 2'-O-methoxyethyl modified nucleotide with phosphorothioate linkage
  modified_base 8: mod_base = OTHER; note = 2'-O-methoxyethyl 5-methylcytosine with phosphorothioate linkage
  modified_base 9: mod_base = OTHER; note = 2'-O-methoxyethyl modified nucleotide with phosphorothioate linkage
  modified_base 10: mod_base = OTHER; note = 2'-O-methoxyethyl 5-methylcytosine with phosphorothioate linkage
  modified_base 11: mod_base = OTHER; note = 2'-O-methoxyethyl modified nucleotide with phosphorothioate linkage
  modified_base 12: mod_base = OTHER; note = 2'-O-methoxyethyl modified nucleotide with phosphorothioate linkage
  modified_base 13: mod_base = OTHER; note = 2'-O-methoxyethyl modified nucleotide with phosphorothioate linkage
  modified_base 14: mod_base = OTHER; note = 2'-O-methoxyethyl modified nucleotide with phosphorothioate linkage
  modified_base 15: mod_base = OTHER; note = 2'-O-methoxyethyl modified nucleotide with phosphorothioate linkage
  modified_base 16: mod_base = OTHER; note = 2'-O-methoxyethyl 5-methylcytosine with phosphorothioate linkage
  modified_base 17: mod_base = OTHER; note = 2'-O-methoxyethyl modified nucleotide with phosphorothioate linkage
  modified_base 18: mod_base = OTHER; note = 2'-O-methoxyethyl 5-methylcytosine with phosphorothioate linkage
  modified_base 19: mod_base = OTHER; note = 2'-O-methoxyethyl modified nucleotide with phosphorothioate linkage
  modified_base 20: mod_base = OTHER; note = 2'-O-methoxyethyl 5-methylcytosine
tgcagggcacgaggacgcac

SEQ ID NO: 181 - RNA, 20 nt, synthetic construct
  source 1..20: mol_type = other RNA
  modified_base 1: mod_base = OTHER; note = 2'-O-methoxyethyl modified nucleotide with phosphorothioate linkage
  modified_base 2: mod_base = OTHER; note = 2'-O-methoxyethyl modified nucleotide with phosphorothioate linkage
  modified_base 3: mod_base = OTHER; note = 2'-O-methoxyethyl 5-methylcytosine with phosphorothioate linkage
  modified_base 4: mod_base = OTHER; note = 2'-O-methoxyethyl modified nucleotide with phosphorothioate linkage
  modified_base 5: mod_base = OTHER; note = 2'-O-methoxyethyl 5-methylcytosine with phosphorothioate linkage
  modified_base 6: mod_base = OTHER; note = 2'-O-methoxyethyl modified nucleotide with phosphorothioate linkage
  modified_base 7: mod_base = OTHER; note = 2'-O-methoxyethyl modified nucleotide with phosphorothioate linkage
  modified_base 8: mod_base = OTHER; note = 2'-O-methoxyethyl modified nucleotide with phosphorothioate linkage
  modified_base 9: mod_base = OTHER; note = 2'-O-methoxyethyl modified nucleotide with phosphorothioate linkage
  modified_base 10: mod_base = OTHER; note = 2'-O-methoxyethyl modified nucleotide with phosphorothioate linkage
  modified_base 11: mod_base = OTHER; note = 2'-O-methoxyethyl 5-methylcytosine with phosphorothioate linkage
  modified_base 12: mod_base = OTHER; note = 2'-O-methoxyethyl modified nucleotide with phosphorothioate linkage
  modified_base 13: mod_base = OTHER; note = 2'-O-methoxyethyl 5-methylcytosine with phosphorothioate linkage
  modified_base 14: mod_base = OTHER; note = 2'-O-methoxyethyl modified nucleotide with phosphorothioate linkage
  modified_base 15: mod_base = OTHER; note = 2'-O-methoxyethyl 5-methylcytosine with phosphorothioate linkage
  modified_base 16: mod_base = OTHER; note = 2'-O-methoxyethyl modified nucleotide with phosphorothioate linkage
  modified_base 17: mod_base = OTHER; note = 2'-O-methoxyethyl modified nucleotide with phosphorothioate linkage
  modified_base 18: mod_base = OTHER; note = 2'-O-methoxyethyl modified nucleotide with phosphorothioate linkage
  modified_base 19: mod_base = OTHER; note = 2'-O-methoxyethyl 5-methylcytosine with phosphorothioate linkage
  modified_base 20: mod_base = OTHER; note = 2'-O-methoxyethyl 5-methylcytosine
ggcacgaggacgcacaaacc

SEQ ID NO: 182 - RNA, 20 nt, synthetic construct
  source 1..20: mol_type = other RNA
  modified_base 1: mod_base = OTHER; note = 2'-O-methoxyethyl modified nucleotide with phosphorothioate linkage
  modified_base 2: mod_base = OTHER; note = 2'-O-methoxyethyl modified nucleotide with phosphorothioate linkage
  modified_base 3: mod_base = OTHER; note = 2'-O-methoxyethyl modified nucleotide with phosphorothioate linkage
  modified_base 4: mod_base = OTHER; note = 2'-O-methoxyethyl modified nucleotide with phosphorothioate linkage
  modified_base 5: mod_base = OTHER; note = 2'-O-methoxyethyl modified nucleotide with phosphorothioate linkage
  modified_base 6: mod_base = OTHER; note = 2'-O-methoxyethyl 5-methylcytosine with phosphorothioate linkage
  modified_base 7: mod_base = OTHER; note = 2'-O-methoxyethyl modified nucleotide with phosphorothioate linkage
  modified_base 8: mod_base = OTHER; note = 2'-O-methoxyethyl 5-methylcytosine with phosphorothioate linkage
  modified_base 9: mod_base = OTHER; note = 2'-O-methoxyethyl modified nucleotide with phosphorothioate linkage
  modified_base 10: mod_base = OTHER; note = 2'-O-methoxyethyl 5-methylcytosine with phosphorothioate linkage
  modified_base 11: mod_base = OTHER; note = 2'-O-methoxyethyl modified nucleotide with phosphorothioate linkage
  modified_base 12: mod_base = OTHER; note = 2'-O-methoxyethyl modified nucleotide with phosphorothioate linkage
  modified_base 13: mod_base = OTHER; note = 2'-O-methoxyethyl modified nucleotide with phosphorothioate linkage
  modified_base 14: mod_base = OTHER; note = 2'-O-methoxyethyl 5-methylcytosine with phosphorothioate linkage
  modified_base 15: mod_base = OTHER; note = 2'-O-methoxyethyl 5-methylcytosine with phosphorothioate linkage
  modified_base 16: mod_base = OTHER; note = 2'-O-methoxyethyl 5-methylcytosine with phosphorothioate linkage
  modified_base 17: mod_base = OTHER; note = 2'-O-methoxyethyl modified thymine with phosphorothioate linkage
  modified_base 18: mod_base = OTHER; note = 2'-O-methoxyethyl 5-methylcytosine with phosphorothioate linkage
  modified_base 19: mod_base = OTHER; note = 2'-O-methoxyethyl 5-methylcytosine with phosphorothioate linkage
  modified_base 20: mod_base = OTHER; note = 2'-O-methoxyethyl modified thymine
gaggacgcacaaaccctcct

SEQ ID NO: 183 - RNA, 20 nt, synthetic construct
  source 1..20: mol_type = other RNA
  modified_base 1: mod_base = OTHER; note = 2'-O-methoxyethyl modified nucleotide with phosphorothioate linkage
  modified_base 2: mod_base = OTHER; note = 2'-O-methoxyethyl modified nucleotide with phosphorothioate linkage
  modified_base 3: mod_base = OTHER; note = 2'-O-methoxyethyl modified nucleotide with phosphorothioate linkage
  modified_base 4: mod_base = OTHER; note = 2'-O-methoxyethyl 5-methylcytosine with phosphorothioate linkage
  modified_base 5: mod_base = OTHER; note = 2'-O-methoxyethyl 5-methylcytosine with phosphorothioate linkage
  modified_base 6: mod_base = OTHER; note = 2'-O-methoxyethyl 5-methylcytosine with phosphorothioate linkage
  modified_base 7: mod_base = OTHER; note = 2'-O-methoxyethyl modified thymine with phosphorothioate linkage
  modified_base 8: mod_base = OTHER; note = 2'-O-methoxyethyl 5-methylcytosine with phosphorothioate linkage
  modified_base 9: mod_base = OTHER; note = 2'-O-methoxyethyl 5-methylcytosine with phosphorothioate linkage
  modified_base 10: mod_base = OTHER; note = 2'-O-methoxyethyl modified thymine with phosphorothioate linkage
  modified_base 11: mod_base = OTHER; note = 2'-O-methoxyethyl modified nucleotide with phosphorothioate linkage
  modified_base 12: mod_base = OTHER; note = 2'-O-methoxyethyl modified thymine with phosphorothioate linkage
  modified_base 13: mod_base = OTHER; note = 2'-O-methoxyethyl modified nucleotide with phosphorothioate linkage
  modified_base 14: mod_base = OTHER; note = 2'-O-methoxyethyl 5-methylcytosine with phosphorothioate linkage
  modified_base 15: mod_base = OTHER; note = 2'-O-methoxyethyl 5-methylcytosine with phosphorothioate linkage
  modified_base 16: mod_base = OTHER; note = 2'-O-methoxyethyl modified nucleotide with phosphorothioate linkage
  modified_base 17: mod_base = OTHER; note = 2'-O-methoxyethyl modified thymine with phosphorothioate linkage
  modified_base 18: mod_base = OTHER; note = 2'-O-methoxyethyl 5-methylcytosine with phosphorothioate linkage
  modified_base 19: mod_base = OTHER; note = 2'-O-methoxyethyl modified nucleotide with phosphorothioate linkage
  modified_base 20: mod_base = OTHER; note = 2'-O-methoxyethyl 5-methylcytosine
aaaccctcctgtaccgtcac

SEQ ID NO: 184 - RNA, 20 nt, synthetic construct
  source 1..20: mol_type = other RNA
  modified_base 1: mod_base = OTHER; note = 2'-O-methoxyethyl 5-methylcytosine with phosphorothioate linkage
  modified_base 2: mod_base = OTHER; note = 2'-O-methoxyethyl modified thymine with phosphorothioate linkage
  modified_base 3: mod_base = OTHER; note = 2'-O-methoxyethyl 5-methylcytosine with phosphorothioate linkage
  modified_base 4: mod_base = OTHER; note = 2'-O-methoxyethyl 5-methylcytosine with phosphorothioate linkage
  modified_base 5: mod_base = OTHER; note = 2'-O-methoxyethyl modified thymine with phosphorothioate linkage
  modified_base 6: mod_base = OTHER; note = 2'-O-methoxyethyl modified nucleotide with phosphorothioate linkage
  modified_base 7: mod_base = OTHER; note = 2'-O-methoxyethyl modified thymine with phosphorothioate linkage
  modified_base 8: mod_base = OTHER; note = 2'-O-methoxyethyl modified nucleotide with phosphorothioate linkage
  modified_base 9: mod_base = OTHER; note = 2'-O-methoxyethyl 5-methylcytosine with phosphorothioate linkage
  modified_base 10: mod_base = OTHER; note = 2'-O-methoxyethyl 5-methylcytosine with phosphorothioate linkage
  modified_base 11: mod_base = OTHER; note = 2'-O-methoxyethyl modified nucleotide with phosphorothioate linkage
  modified_base 12: mod_base = OTHER; note = 2'-O-methoxyethyl modified thymine with phosphorothioate linkage
  modified_base 13: mod_base = OTHER; note = 2'-O-methoxyethyl 5-methylcytosine with phosphorothioate linkage
  modified_base 14: mod_base = OTHER; note = 2'-O-methoxyethyl modified nucleotide with phosphorothioate linkage
  modified_base 15: mod_base = OTHER; note = 2'-O-methoxyethyl 5-methylcytosine with phosphorothioate linkage
  modified_base 16: mod_base = OTHER; note = 2'-O-methoxyethyl modified thymine with phosphorothioate linkage
  modified_base 17: mod_base = OTHER; note = 2'-O-methoxyethyl modified nucleotide with phosphorothioate linkage
  modified_base 18: mod_base = OTHER; note = 2'-O-methoxyethyl modified nucleotide with phosphorothioate linkage
  modified_base 19: mod_base = OTHER; note = 2'-O-methoxyethyl 5-methylcytosine with phosphorothioate linkage
  modified_base 20: mod_base = OTHER; note = 2'-O-methoxyethyl modified thymine
ctcctgtaccgtcactgact

SEQ ID NO: 185 - RNA, 20 nt, synthetic construct
  source 1..20: mol_type = other RNA
  modified_base 1: mod_base = OTHER; note = 2'-O-methoxyethyl modified nucleotide with phosphorothioate linkage
  modified_base 2: mod_base = OTHER; note = 2'-O-methoxyethyl modified thymine with phosphorothioate linkage
  modified_base 3: mod_base = OTHER; note = 2'-O-methoxyethyl modified nucleotide with phosphorothioate linkage
  modified_base 4: mod_base = OTHER; note = 2'-O-methoxyethyl 5-methylcytosine with phosphorothioate linkage
  modified_base 5: mod_base = OTHER; note = 2'-O-methoxyethyl 5-methylcytosine with phosphorothioate linkage
  modified_base 6: mod_base = OTHER; note = 2'-O-methoxyethyl modified nucleotide with phosphorothioate linkage
  modified_base 7: mod_base = OTHER; note = 2'-O-methoxyethyl modified thymine with phosphorothioate linkage
  modified_base 8: mod_base = OTHER; note = 2'-O-methoxyethyl 5-methylcytosine with phosphorothioate linkage
  modified_base 9: mod_base = OTHER; note = 2'-O-methoxyethyl modified nucleotide with phosphorothioate linkage
  modified_base 10: mod_base = OTHER; note = 2'-O-methoxyethyl 5-methylcytosine with phosphorothioate linkage
  modified_base 11: mod_base = OTHER; note = 2'-O-methoxyethyl modified thymine with phosphorothioate linkage
  modified_base 12: mod_base = OTHER; note = 2'-O-methoxyethyl modified nucleotide with phosphorothioate linkage
  modified_base 13: mod_base = OTHER; note = 2'-O-methoxyethyl modified nucleotide with phosphorothioate linkage
  modified_base 14: mod_base = OTHER; note = 2'-O-methoxyethyl 5-methylcytosine with phosphorothioate linkage
  modified_base 15: mod_base = OTHER; note = 2'-O-methoxyethyl modified thymine with phosphorothioate linkage
  modified_base 16: mod_base = OTHER; note = 2'-O-methoxyethyl 5-methylcytosine with phosphorothioate linkage
  modified_base 17: mod_base = OTHER; note = 2'-O-methoxyethyl 5-methylcytosine with phosphorothioate linkage
  modified_base 18: mod_base = OTHER; note = 2'-O-methoxyethyl modified thymine with phosphorothioate linkage
  modified_base 19: mod_base = OTHER; note = 2'-O-methoxyethyl modified nucleotide with phosphorothioate linkage
  modified_base 20: mod_base = OTHER; note = 2'-O-methoxyethyl 5-methylcytosine
gtaccgtcactgactcctgc

SEQ ID NO: 186 - RNA, 20 nt, synthetic construct
  source 1..20: mol_type = other RNA
  modified_base 1: mod_base = OTHER; note = 2'-O-methoxyethyl modified nucleotide with phosphorothioate linkage
  modified_base 2: mod_base = OTHER; note = 2'-O-methoxyethyl modified thymine with phosphorothioate linkage
  modified_base 3: mod_base = OTHER; note = 2'-O-methoxyethyl 5-methylcytosine with phosphorothioate linkage
  modified_base 4: mod_base = OTHER; note = 2'-O-methoxyethyl modified nucleotide with phosphorothioate linkage
  modified_base 5: mod_base = OTHER; note = 2'-O-methoxyethyl 5-methylcytosine with phosphorothioate linkage
  modified_base 6: mod_base = OTHER; note = 2'-O-methoxyethyl modified thymine with phosphorothioate linkage
  modified_base 7: mod_base = OTHER; note = 2'-O-methoxyethyl modified nucleotide with phosphorothioate linkage
  modified_base 8: mod_base = OTHER; note = 2'-O-methoxyethyl modified nucleotide with phosphorothioate linkage
  modified_base 9: mod_base = OTHER; note = 2'-O-methoxyethyl 5-methylcytosine with phosphorothioate linkage
  modified_base 10: mod_base = OTHER; note = 2'-O-methoxyethyl modified thymine with phosphorothioate linkage
  modified_base 11: mod_base = OTHER; note = 2'-O-methoxyethyl 5-methylcytosine with phosphorothioate linkage
  modified_base 12: mod_base = OTHER; note = 2'-O-methoxyethyl 5-methylcytosine with phosphorothioate linkage
  modified_base 13: mod_base = OTHER; note = 2'-O-methoxyethyl modified thymine with phosphorothioate linkage
  modified_base 14: mod_base = OTHER; note = 2'-O-methoxyethyl modified nucleotide with phosphorothioate linkage
  modified_base 15: mod_base = OTHER; note = 2'-O-methoxyethyl 5-methylcytosine with phosphorothioate linkage
  modified_base 16: mod_base = OTHER; note = 2'-O-methoxyethyl modified nucleotide with phosphorothioate linkage
  modified_base 17: mod_base = OTHER; note = 2'-O-methoxyethyl 5-methylcytosine with phosphorothioate linkage
  modified_base 18: mod_base = OTHER; note = 2'-O-methoxyethyl modified thymine with phosphorothioate linkage
  modified_base 19: mod_base = OTHER; note = 2'-O-methoxyethyl modified thymine with phosphorothioate linkage
  modified_base 20: mod_base = OTHER; note = 2'-O-methoxyethyl modified nucleotide
gtcactgactcctgcacttg

SEQ ID NO: 187 - RNA, 20 nt, synthetic construct
  source 1..20: mol_type = other RNA
  modified_base 1: mod_base = OTHER; note = 2'-O-methoxyethyl modified thymine with phosphorothioate linkage
  modified_base 2: mod_base = OTHER; note = 2'-O-methoxyethyl modified nucleotide with phosphorothioate linkage
  modified_base 3: mod_base = OTHER; note = 2'-O-methoxyethyl modified nucleotide with phosphorothioate linkage
  modified_base 4: mod_base = OTHER; note = 2'-O-methoxyethyl 5-methylcytosine with phosphorothioate linkage
  modified_base 5: mod_base = OTHER; note = 2'-O-methoxyethyl modified thymine with phosphorothioate linkage
  modified_base 6: mod_base = OTHER; note = 2'-O-methoxyethyl 5-methylcytosine with phosphorothioate linkage
  modified_base 7: mod_base = OTHER; note = 2'-O-methoxyethyl 5-methylcytosine with phosphorothioate linkage
  modified_base 8: mod_base = OTHER; note = 2'-O-methoxyethyl modified thymine with phosphorothioate linkage
  modified_base 9: mod_base = OTHER; note = 2'-O-methoxyethyl modified nucleotide with phosphorothioate linkage
  modified_base 10: mod_base = OTHER; note = 2'-O-methoxyethyl 5-methylcytosine with phosphorothioate linkage
  modified_base 11: mod_base = OTHER; note = 2'-O-methoxyethyl modified nucleotide with phosphorothioate linkage
  modified_base 12: mod_base = OTHER; note = 2'-O-methoxyethyl 5-methylcytosine with phosphorothioate linkage
  modified_base 13: mod_base = OTHER; note = 2'-O-methoxyethyl modified thymine with phosphorothioate linkage
  modified_base 14: mod_base = OTHER; note = 2'-O-methoxyethyl modified thymine with phosphorothioate linkage
  modified_base 15: mod_base = OTHER; note = 2'-O-methoxyethyl modified nucleotide with phosphorothioate linkage
  modified_base 16: mod_base = OTHER; note = 2'-O-methoxyethyl 5-methylcytosine with phosphorothioate linkage
  modified_base 17: mod_base = OTHER; note = 2'-O-methoxyethyl modified nucleotide with phosphorothioate linkage
  modified_base 18: mod_base = OTHER; note = 2'-O-methoxyethyl modified nucleotide with phosphorothioate linkage
  modified_base 19: mod_base = OTHER; note = 2'-O-methoxyethyl 5-methylcytosine with phosphorothioate linkage
  modified_base 20: mod_base = OTHER; note = 2'-O-methoxyethyl 5-methylcytosine
tgactcctgcacttgcagcc

SEQ ID NO: 188 - RNA, 20 nt, synthetic construct
  source 1..20: mol_type = other RNA
  modified_base 1: mod_base = OTHER; note = 2'-O-methoxyethyl 5-methylcytosine with phosphorothioate linkage
  modified_base 2: mod_base = OTHER; note = 2'-O-methoxyethyl 5-methylcytosine with phosphorothioate linkage
  modified_base 3: mod_base = OTHER; note = 2'-O-methoxyethyl modified thymine with phosphorothioate linkage
  modified_base 4: mod_base = OTHER; note = 2'-O-methoxyethyl modified nucleotide with phosphorothioate linkage
  modified_base 5: mod_base = OTHER; note = 2'-O-methoxyethyl 5-methylcytosine with phosphorothioate linkage
  modified_base 6: mod_base = OTHER; note = 2'-O-methoxyethyl modified nucleotide with phosphorothioate linkage
  modified_base 7: mod_base = OTHER; note = 2'-O-methoxyethyl 5-methylcytosine with phosphorothioate linkage
  modified_base 8: mod_base = OTHER; note = 2'-O-methoxyethyl modified thymine with phosphorothioate linkage
  modified_base 9: mod_base = OTHER; note = 2'-O-methoxyethyl modified thymine with phosphorothioate linkage
  modified_base 10: mod_base = OTHER; note = 2'-O-methoxyethyl modified nucleotide with phosphorothioate linkage
  modified_base 11: mod_base = OTHER; note = 2'-O-methoxyethyl 5-methylcytosine with phosphorothioate linkage
  modified_base 12: mod_base = OTHER; note = 2'-O-methoxyethyl modified nucleotide with phosphorothioate linkage
  modified_base 13: mod_base = OTHER; note = 2'-O-methoxyethyl modified nucleotide with phosphorothioate linkage
  modified_base 14: mod_base = OTHER; note = 2'-O-methoxyethyl 5-methylcytosine with phosphorothioate linkage
  modified_base 15: mod_base = OTHER; note = 2'-O-methoxyethyl 5-methylcytosine with phosphorothioate linkage
  modified_base 16: mod_base = OTHER; note = 2'-O-methoxyethyl modified nucleotide with phosphorothioate linkage
  modified_base 17: mod_base = OTHER; note = 2'-O-methoxyethyl modified nucleotide with phosphorothioate linkage
  modified_base 18: mod_base = OTHER; note = 2'-O-methoxyethyl modified nucleotide with phosphorothioate linkage
  modified_base 19: mod_base = OTHER; note = 2'-O-methoxyethyl modified nucleotide with phosphorothioate linkage
  modified_base 20: mod_base = OTHER; note = 2'-O-methoxyethyl modified nucleotide
cctgcacttgcagccagaaa

SEQ ID NO: 189 - RNA, 20 nt, synthetic construct
  source 1..20: mol_type = other RNA
  modified_base 1: mod_base = OTHER; note = 2'-O-methoxyethyl modified nucleotide with phosphorothioate linkage
  modified_base 2: mod_base = OTHER; note = 2'-O-methoxyethyl 5-methylcytosine with phosphorothioate linkage
  modified_base 3: mod_base = OTHER; note = 2'-O-methoxyethyl modified thymine with phosphorothioate linkage
  modified_base 4: mod_base = OTHER; note = 2'-O-methoxyethyl modified thymine with phosphorothioate linkage
  modified_base 5: mod_base = OTHER; note = 2'-O-methoxyethyl modified nucleotide with phosphorothioate linkage
  modified_base 6: mod_base = OTHER; note = 2'-O-methoxyethyl 5-methylcytosine with phosphorothioate linkage
  modified_base 7: mod_base = OTHER; note = 2'-O-methoxyethyl modified nucleotide with phosphorothioate linkage
  modified_base 8: mod_base = OTHER; note = 2'-O-methoxyethyl modified nucleotide with phosphorothioate linkage
  modified_base 9: mod_base = OTHER; note = 2'-O-methoxyethyl 5-methylcytosine with phosphorothioate linkage
  modified_base 10: mod_base = OTHER; note = 2'-O-methoxyethyl 5-methylcytosine with phosphorothioate linkage
  modified_base 11: mod_base = OTHER; note = 2'-O-methoxyethyl modified nucleotide with phosphorothioate linkage
  modified_base 12: mod_base = OTHER; note = 2'-O-methoxyethyl modified nucleotide with phosphorothioate linkage
  modified_base 13: mod_base = OTHER; note = 2'-O-methoxyethyl modified nucleotide with phosphorothioate linkage
  modified_base 14: mod_base = OTHER; note = 2'-O-methoxyethyl modified nucleotide with phosphorothioate linkage
  modified_base 15: mod_base = OTHER; note = 2'-O-methoxyethyl modified nucleotide with phosphorothioate linkage
  modified_base 16: mod_base = OTHER; note = 2'-O-methoxyethyl modified thymine with phosphorothioate linkage
  modified_base 17: mod_base = OTHER; note = 2'-O-methoxyethyl modified thymine with phosphorothioate linkage
  modified_base 18: mod_base = OTHER; note = 2'-O-methoxyethyl modified thymine with phosphorothioate linkage
  modified_base 19: mod_base = OTHER; note = 2'-O-methoxyethyl modified nucleotide with phosphorothioate linkage
  modified_base 20: mod_base = OTHER; note = 2'-O-methoxyethyl modified nucleotide
acttgcagccagaaatttgg

SEQ ID NO: 190 - RNA, 20 nt, synthetic construct
  source 1..20: mol_type = other RNA
  modified_base 1: mod_base = OTHER; note = 2'-O-methoxyethyl 5-methylcytosine with phosphorothioate linkage
  modified_base 2: mod_base = OTHER; note = 2'-O-methoxyethyl modified nucleotide with phosphorothioate linkage
  modified_base 3: mod_base = OTHER; note = 2'-O-methoxyethyl modified nucleotide with phosphorothioate linkage
  modified_base 4: mod_base = OTHER; note = 2'-O-methoxyethyl 5-methylcytosine with phosphorothioate linkage
  modified_base 5: mod_base = OTHER; note = 2'-O-methoxyethyl 5-methylcytosine with phosphorothioate linkage
  modified_base 6: mod_base = OTHER; note = 2'-O-methoxyethyl modified nucleotide with phosphorothioate linkage
  modified_base 7: mod_base = OTHER; note = 2'-O-methoxyethyl modified nucleotide with phosphorothioate linkage
  modified_base 8: mod_base = OTHER; note = 2'-O-methoxyethyl modified nucleotide with phosphorothioate linkage
  modified_base 9: mod_base = OTHER; note = 2'-O-methoxyethyl modified nucleotide with phosphorothioate linkage
  modified_base 10: mod_base = OTHER; note = 2'-O-methoxyethyl modified nucleotide with phosphorothioate linkage
  modified_base 11: mod_base = OTHER; note = 2'-O-methoxyethyl modified thymine with phosphorothioate linkage
  modified_base 12: mod_base = OTHER; note = 2'-O-methoxyethyl modified thymine with phosphorothioate linkage
  modified_base 13: mod_base = OTHER; note = 2'-O-methoxyethyl modified thymine with phosphorothioate linkage
  modified_base 14: mod_base = OTHER; note = 2'-O-methoxyethyl modified nucleotide with phosphorothioate linkage
  modified_base 15: mod_base = OTHER; note = 2'-O-methoxyethyl modified nucleotide with phosphorothioate linkage
  modified_base 16: mod_base = OTHER; note = 2'-O-methoxyethyl modified nucleotide with phosphorothioate linkage
  modified_base 17: mod_base = OTHER; note = 2'-O-methoxyethyl modified thymine with phosphorothioate linkage
  modified_base 18: mod_base = OTHER; note = 2'-O-methoxyethyl 5-methylcytosine with phosphorothioate linkage
  modified_base 19: mod_base = OTHER; note = 2'-O-methoxyethyl 5-methylcytosine with phosphorothioate linkage
  modified_base 20: mod_base = OTHER; note = 2'-O-methoxyethyl modified nucleotide
cagccagaaatttggatcca

SEQ ID NO: 191 - RNA, 20 nt, synthetic construct
  source 1..20: mol_type = other RNA
  modified_base 1: mod_base = OTHER; note = 2'-O-methoxyethyl modified nucleotide with phosphorothioate linkage
  modified_base 2: mod_base = OTHER; note = 2'-O-methoxyethyl modified nucleotide with phosphorothioate linkage
  modified_base 3: mod_base = OTHER; note = 2'-O-methoxyethyl modified nucleotide with phosphorothioate linkage
  modified_base 4: mod_base = OTHER; note = 2'-O-methoxyethyl modified nucleotide with phosphorothioate linkage
  modified_base 5: mod_base = OTHER; note = 2'-O-methoxyethyl modified nucleotide with phosphorothioate linkage
  modified_base 6: mod_base = OTHER; note = 2'-O-methoxyethyl modified thymine with phosphorothioate linkage
  modified_base 7: mod_base = OTHER; note = 2'-O-methoxyethyl modified thymine with phosphorothioate linkage
  modified_base 8: mod_base = OTHER; note = 2'-O-methoxyethyl modified thymine with phosphorothioate linkage
  modified_base 9: mod_base = OTHER; note = 2'-O-methoxyethyl modified nucleotide with phosphorothioate linkage
  modified_base 10: mod_base = OTHER; note = 2'-O-methoxyethyl modified nucleotide with phosphorothioate linkage
  modified_base 11: mod_base = OTHER; note = 2'-O-methoxyethyl modified nucleotide with phosphorothioate linkage
  modified_base 12: mod_base = OTHER; note = 2'-O-methoxyethyl modified thymine with phosphorothioate linkage
  modified_base 13: mod_base = OTHER; note = 2'-O-methoxyethyl 5-methylcytosine with phosphorothioate linkage
  modified_base 14: mod_base = OTHER; note = 2'-O-methoxyethyl 5-methylcytosine with phosphorothioate linkage
  modified_base 15: mod_base = OTHER; note = 2'-O-methoxyethyl modified nucleotide with phosphorothioate linkage
  modified_base 16: mod_base = OTHER; note = 2'-O-methoxyethyl modified thymine with phosphorothioate linkage
  modified_base 17: mod_base = OTHER; note = 2'-O-methoxyethyl modified nucleotide with phosphorothioate linkage
  modified_base 18: mod_base = OTHER; note = 2'-O-methoxyethyl modified nucleotide with phosphorothioate linkage
  modified_base 19: mod_base = OTHER; note = 2'-O-methoxyethyl 5-methylcytosine with phosphorothioate linkage
  modified_base 20: mod_base = OTHER; note = 2'-O-methoxyethyl 5-methylcytosine
agaaatttggatccatagcc

SEQ ID NO: 192 - RNA, 20 nt, synthetic construct
  source 1..20: mol_type = other RNA
  modified_base 1: mod_base = OTHER; note = 2'-O-methoxyethyl modified thymine with phosphorothioate linkage
  modified_base 2: mod_base = OTHER; note = 2'-O-methoxyethyl modified thymine with phosphorothioate linkage
  modified_base 3: mod_base = OTHER; note = 2'-O-methoxyethyl modified thymine with phosphorothioate linkage
  modified_base 4: mod_base = OTHER; note = 2'-O-methoxyethyl modified nucleotide with phosphorothioate linkage
  modified_base 5: mod_base = OTHER; note = 2'-O-methoxyethyl modified nucleotide with phosphorothioate linkage
  modified_base 6: mod_base = OTHER; note = 2'-O-methoxyethyl modified nucleotide with phosphorothioate linkage
  modified_base 7: mod_base = OTHER; note = 2'-O-methoxyethyl modified thymine with phosphorothioate linkage
  modified_base 8: mod_base = OTHER; note = 2'-O-methoxyethyl 5-methylcytosine with phosphorothioate linkage
  modified_base 9: mod_base = OTHER; note = 2'-O-methoxyethyl 5-methylcytosine with phosphorothioate linkage
  modified_base 10: mod_base = OTHER; note = 2'-O-methoxyethyl modified nucleotide with phosphorothioate linkage
  modified_base 11: mod_base = OTHER; note = 2'-O-methoxyethyl modified thymine with phosphorothioate linkage
  modified_base 12: mod_base = OTHER; note = 2'-O-methoxyethyl modified nucleotide with phosphorothioate linkage
  modified_base 13: mod_base = OTHER; note = 2'-O-methoxyethyl modified nucleotide with phosphorothioate linkage
  modified_base 14: mod_base = OTHER; note = 2'-O-methoxyethyl 5-methylcytosine with phosphorothioate linkage
  modified_base 15: mod_base = OTHER; note = 2'-O-methoxyethyl 5-methylcytosine with phosphorothioate linkage
  modified_base 16: mod_base = OTHER; note = 2'-O-methoxyethyl modified nucleotide with phosphorothioate linkage
  modified_base 17: mod_base = OTHER; note = 2'-O-methoxyethyl modified nucleotide with phosphorothioate linkage
  modified_base 18: mod_base = OTHER; note = 2'-O-methoxyethyl modified nucleotide with phosphorothioate linkage
  modified_base 19: mod_base = OTHER; note = 2'-O-methoxyethyl modified nucleotide with phosphorothioate linkage
  modified_base 20: mod_base = OTHER; note = 2'-O-methoxyethyl 5-methylcytosine
tttggatccatagccagggc

SEQ ID NO: 193 - RNA, 20 nt, synthetic construct
  source 1..20: mol_type = other RNA
  modified_base 1: mod_base = OTHER; note = 2'-O-methoxyethyl modified nucleotide with phosphorothioate linkage
  modified_base 2: mod_base = OTHER; note = 2'-O-methoxyethyl modified thymine with phosphorothioate linkage
  modified_base 3: mod_base = OTHER; note = 2'-O-methoxyethyl 5-methylcytosine with phosphorothioate linkage
  modified_base 4: mod_base = OTHER; note = 2'-O-methoxyethyl 5-methylcytosine with phosphorothioate linkage
  modified_base 5: mod_base = OTHER; note = 2'-O-methoxyethyl modified nucleotide with phosphorothioate linkage
  modified_base 6: mod_base = OTHER; note = 2'-O-methoxyethyl modified thymine with phosphorothioate linkage
  modified_base 7: mod_base = OTHER; note = 2'-O-methoxyethyl modified nucleotide with phosphorothioate linkage
  modified_base 8: mod_base = OTHER; note = 2'-O-methoxyethyl modified nucleotide with phosphorothioate linkage
  modified_base 9: mod_base = OTHER; note = 2'-O-methoxyethyl 5-methylcytosine with phosphorothioate linkage
  modified_base 10: mod_base = OTHER; note = 2'-O-methoxyethyl 5-methylcytosine with phosphorothioate linkage
  modified_base 11: mod_base = OTHER; note = 2'-O-methoxyethyl modified nucleotide with phosphorothioate linkage
  modified_base 12: mod_base = OTHER; note = 2'-O-methoxyethyl modified nucleotide with phosphorothioate linkage
  modified_base 13: mod_base = OTHER; note = 2'-O-methoxyethyl modified nucleotide with phosphorothioate linkage
  modified_base 14: mod_base = OTHER; note = 2'-O-methoxyethyl modified nucleotide with phosphorothioate linkage
  modified_base 15: mod_base = OTHER; note = 2'-O-methoxyethyl 5-methylcytosine with phosphorothioate linkage
  modified_base 16: mod_base = OTHER; note = 2'-O-methoxyethyl 5-methylcytosine with phosphorothioate linkage
  modified_base 17: mod_base = OTHER; note = 2'-O-methoxyethyl 5-methylcytosine with phosphorothioate linkage
  modified_base 18: mod_base = OTHER; note = 2'-O-methoxyethyl 5-methylcytosine with phosphorothioate linkage
  modified_base 19: mod_base = OTHER; note = 2'-O-methoxyethyl modified thymine with phosphorothioate linkage
  modified_base 20: mod_base = OTHER; note = 2'-O-methoxyethyl modified nucleotide
atccatagccagggcccctg

SEQ ID NO: 194 - RNA, 20 nt, synthetic construct
  source 1..20: mol_type = other RNA
  modified_base 1: mod_base = OTHER; note = 2'-O-methoxyethyl modified thymine with phosphorothioate linkage
  modified_base 2: mod_base = OTHER; note = 2'-O-methoxyethyl modified nucleotide with phosphorothioate linkage
  modified_base 3: mod_base = OTHER; note = 2'-O-methoxyethyl modified nucleotide with phosphorothioate linkage
  modified_base 4: mod_base = OTHER; note = 2'-O-methoxyethyl 5-methylcytosine with phosphorothioate linkage
  modified_base 5: mod_base = OTHER; note = 2'-O-methoxyethyl 5-methylcytosine with phosphorothioate linkage
  modified_base 6: mod_base = OTHER; note = 2'-O-methoxyethyl modified nucleotide with phosphorothioate linkage
  modified_base 7: mod_base = OTHER; note = 2'-O-methoxyethyl modified nucleotide with phosphorothioate linkage
  modified_base 8: mod_base = OTHER; note = 2'-O-methoxyethyl modified nucleotide with phosphorothioate linkage
  modified_base 9: mod_base = OTHER; note = 2'-O-methoxyethyl modified nucleotide with phosphorothioate linkage
  modified_base 10: mod_base = OTHER; note = 2'-O-methoxyethyl 5-methylcytosine with phosphorothioate linkage
  modified_base 11: mod_base = OTHER; note = 2'-O-methoxyethyl 5-methylcytosine with phosphorothioate linkage
  modified_base 12: mod_base = OTHER; note = 2'-O-methoxyethyl 5-methylcytosine with phosphorothioate linkage
  modified_base 13: mod_base = OTHER; note = 2'-O-methoxyethyl 5-methylcytosine with phosphorothioate linkage
  modified_base 14: mod_base = OTHER; note = 2'-O-methoxyethyl modified thymine with phosphorothioate linkage
  modified_base 15: mod_base = OTHER; note = 2'-O-methoxyethyl modified nucleotide with phosphorothioate linkage
  modified_base 16: mod_base = OTHER; note = 2'-O-methoxyethyl modified thymine with phosphorothioate linkage
  modified_base 17: mod_base = OTHER; note = 2'-O-methoxyethyl modified nucleotide with phosphorothioate linkage
  modified_base 18: mod_base = OTHER; note = 2'-O-methoxyethyl modified nucleotide with phosphorothioate linkage
  modified_base 19: mod_base = OTHER; note = 2'-O-methoxyethyl modified nucleotide with phosphorothioate linkage
  modified_base 20: mod_base = OTHER; note = 2'-O-methoxyethyl modified nucleotide
tagccagggcccctgtgggg

SEQ ID NO: 195 - RNA, 20 nt, synthetic construct
  source 1..20: mol_type = other RNA
  modified_base 1: mod_base = OTHER; note = 2'-O-methoxyethyl modified nucleotide with phosphorothioate linkage
  modified_base 2: mod_base = OTHER; note = 2'-O-methoxyethyl modified nucleotide with phosphorothioate linkage
  modified_base 3: mod_base = OTHER; note = 2'-O-methoxyethyl modified nucleotide with phosphorothioate linkage
  modified_base 4: mod_base = OTHER; note = 2'-O-methoxyethyl modified nucleotide with phosphorothioate linkage
  modified_base 5: mod_base = OTHER; note = 2'-O-methoxyethyl 5-methylcytosine with phosphorothioate linkage
  modified_base 6: mod_base = OTHER; note = 2'-O-methoxyethyl 5-methylcytosine with phosphorothioate linkage
  modified_base 7: mod_base = OTHER; note = 2'-O-methoxyethyl 5-methylcytosine with phosphorothioate linkage
  modified_base 8: mod_base = OTHER; note = 2'-O-methoxyethyl 5-methylcytosine with phosphorothioate linkage
  modified_base 9: mod_base = OTHER; note = 2'-O-methoxyethyl modified thymine with phosphorothioate linkage
  modified_base 10: mod_base = OTHER; note = 2'-O-methoxyethyl modified nucleotide with phosphorothioate linkage
  modified_base 11: mod_base = OTHER; note = 2'-O-methoxyethyl modified thymine with phosphorothioate linkage
  modified_base 12: mod_base = OTHER; note = 2'-O-methoxyethyl modified nucleotide with phosphorothioate linkage
  modified_base 13: mod_base = OTHER; note = 2'-O-methoxyethyl modified nucleotide with phosphorothioate linkage
  modified_base 14: mod_base = OTHER; note = 2'-O-methoxyethyl modified nucleotide with phosphorothioate linkage
  modified_base 15: mod_base = OTHER; note = 2'-O-methoxyethyl modified nucleotide with phosphorothioate linkage
  modified_base 16: mod_base = OTHER; note = 2'-O-methoxyethyl modified nucleotide with phosphorothioate linkage
  modified_base 17: mod_base = OTHER; note = 2'-O-methoxyethyl modified nucleotide with phosphorothioate linkage
  modified_base 18: mod_base = OTHER; note = 2'-O-methoxyethyl modified nucleotide with phosphorothioate linkage
  modified_base 19: mod_base = OTHER; note = 2'-O-methoxyethyl 5-methylcytosine with phosphorothioate linkage
  modified_base 20: mod_base = OTHER; note = 2'-O-methoxyethyl modified nucleotide
agggcccctgtggggaaacg

SEQ ID NO: 196 - RNA, 20 nt, synthetic construct
  source 1..20: mol_type = other RNA
  modified_base 1: mod_base = OTHER; note = 2'-O-methoxyethyl 5-methylcytosine with phosphorothioate linkage
  modified_base 2: mod_base = OTHER; note = 2'-O-methoxyethyl 5-methylcytosine with phosphorothioate linkage
  modified_base 3: mod_base = OTHER; note = 2'-O-methoxyethyl 5-methylcytosine with phosphorothioate linkage
  modified_base 4: mod_base = OTHER; note = 2'-O-methoxyethyl modified thymine with phosphorothioate linkage
  modified_base 5: mod_base = OTHER; note = 2'-O-methoxyethyl modified nucleotide with phosphorothioate linkage
  modified_base 6: mod_base = OTHER; note = 2'-O-methoxyethyl modified thymine with phosphorothioate linkage
  modified_base 7: mod_base = OTHER; note = 2'-O-methoxyethyl modified nucleotide with phosphorothioate linkage
  modified_base 8: mod_base = OTHER; note = 2'-O-methoxyethyl modified nucleotide with phosphorothioate linkage
  modified_base 9: mod_base = OTHER; note = 2'-O-methoxyethyl modified nucleotide with phosphorothioate linkage
  modified_base 10: mod_base = OTHER; note = 2'-O-methoxyethyl modified nucleotide with phosphorothioate linkage
  modified_base 11: mod_base = OTHER; note = 2'-O-methoxyethyl modified nucleotide with phosphorothioate linkage
  modified_base 12: mod_base = OTHER; note = 2'-O-methoxyethyl modified nucleotide with phosphorothioate linkage
  modified_base 13: mod_base = OTHER; note = 2'-O-methoxyethyl modified nucleotide with phosphorothioate linkage
  modified_base 14: mod_base = OTHER; note = 2'-O-methoxyethyl 5-methylcytosine with phosphorothioate linkage
  modified_base 15: mod_base = OTHER; note = 2'-O-methoxyethyl modified nucleotide with phosphorothioate linkage
  modified_base 16: mod_base = OTHER; note = 2'-O-methoxyethyl modified nucleotide with phosphorothioate linkage
  modified_base 17: mod_base = OTHER; note = 2'-O-methoxyethyl modified nucleotide with phosphorothioate linkage
  modified_base 18: mod_base = OTHER; note = 2'-O-methoxyethyl modified nucleotide with phosphorothioate linkage
  modified_base 19: mod_base = OTHER; note = 2'-O-methoxyethyl modified nucleotide with phosphorothioate linkage
  modified_base 20: mod_base = OTHER; note = 2'-O-methoxyethyl modified thymine
ccctgtggggaaacgagggt

SEQ ID NO: 197 - RNA, 20 nt, synthetic construct
  source 1..20: mol_type = other RNA
  modified_base 1: mod_base = OTHER; note = 2'-O-methoxyethyl modified thymine with phosphorothioate linkage
  modified_base 2: mod_base = OTHER; note = 2'-O-methoxyethyl modified nucleotide with phosphorothioate linkage
  modified_base 3: mod_base = OTHER; note = 2'-O-methoxyethyl modified nucleotide with phosphorothioate linkage
  modified_base 4: mod_base = OTHER; note = 2'-O-methoxyethyl modified nucleotide with phosphorothioate linkage
  modified_base 5: mod_base = OTHER; note = 2'-O-methoxyethyl modified nucleotide with phosphorothioate linkage
  modified_base 6: mod_base = OTHER; note = 2'-O-methoxyethyl modified nucleotide with phosphorothioate linkage
  modified_base 7: mod_base = OTHER; note = 2'-O-methoxyethyl modified nucleotide with phosphorothioate linkage
  modified_base 8: mod_base = OTHER; note = 2'-O-methoxyethyl modified nucleotide with phosphorothioate linkage
  modified_base 9: mod_base = OTHER; note = 2'-O-methoxyethyl 5-methylcytosine with phosphorothioate linkage
  modified_base 10: mod_base = OTHER; note = 2'-O-methoxyethyl modified nucleotide with phosphorothioate linkage
  modified_base 11: mod_base = OTHER; note = 2'-O-methoxyethyl modified nucleotide with phosphorothioate linkage
  modified_base 12: mod_base = OTHER; note = 2'-O-methoxyethyl modified nucleotide with phosphorothioate linkage
  modified_base 13: mod_base = OTHER; note = 2'-O-methoxyethyl modified nucleotide with phosphorothioate linkage
  modified_base 14: mod_base = OTHER; note = 2'-O-methoxyethyl modified nucleotide with phosphorothioate linkage
  modified_base 15: mod_base = OTHER; note = 2'-O-methoxyethyl modified thymine with phosphorothioate linkage
  modified_base 16: mod_base = OTHER; note = 2'-O-methoxyethyl 5-methylcytosine with phosphorothioate linkage
  modified_base 17: mod_base = OTHER; note = 2'-O-methoxyethyl modified nucleotide with phosphorothioate linkage
  modified_base 18: mod_base = OTHER; note = 2'-O-methoxyethyl modified nucleotide with phosphorothioate linkage
  modified_base 19: mod_base = OTHER; note = 2'-O-methoxyethyl 5-methylcytosine with phosphorothioate linkage
  modified_base 20: mod_base = OTHER; note = 2'-O-methoxyethyl modified thymine
tggggaaacgagggtcagct

SEQ ID NO: 198 - RNA, 20 nt, synthetic construct
  source 1..20: mol_type = other RNA
  modified_base 1: mod_base = OTHER; note = 2'-O-methoxyethyl modified nucleotide with phosphorothioate linkage
  modified_base 2: mod_base = OTHER; note = 2'-O-methoxyethyl modified nucleotide with phosphorothioate linkage
  modified_base 3: mod_base = OTHER; note = 2'-O-methoxyethyl modified nucleotide with phosphorothioate linkage
  modified_base 4: mod_base = OTHER; note = 2'-O-methoxyethyl 5-methylcytosine with phosphorothioate linkage
  modified_base 5: mod_base = OTHER; note = 2'-O-methoxyethyl modified nucleotide with phosphorothioate linkage
  modified_base 6: mod_base = OTHER; note = 2'-O-methoxyethyl modified nucleotide with phosphorothioate linkage
  modified_base 7: mod_base = OTHER; note = 2'-O-methoxyethyl modified nucleotide with phosphorothioate linkage
  modified_base 8: mod_base = OTHER; note = 2'-O-methoxyethyl modified nucleotide with phosphorothioate linkage
  modified_base 9: mod_base = OTHER; note = 2'-O-methoxyethyl modified nucleotide with phosphorothioate linkage
  modified_base 10: mod_base = OTHER; note = 2'-O-methoxyethyl modified thymine with phosphorothioate linkage
  modified_base 11: mod_base = OTHER; note = 2'-O-methoxyethyl 5-methylcytosine with phosphorothioate linkage
  modified_base 12: mod_base = OTHER; note = 2'-O-methoxyethyl modified nucleotide with phosphorothioate linkage
  modified_base 13: mod_base = OTHER; note = 2'-O-methoxyethyl modified nucleotide with phosphorothioate linkage
  modified_base 14: mod_base = OTHER; note = 2'-O-methoxyethyl 5-methylcytosine with phosphorothioate linkage
  modified_base 15: mod_base = OTHER; note = 2'-O-methoxyethyl modified thymine with phosphorothioate linkage
  modified_base 16: mod_base = OTHER; note = 2'-O-methoxyethyl 5-methylcytosine with phosphorothioate linkage
  modified_base 17: mod_base = OTHER; note = 2'-O-methoxyethyl modified nucleotide with phosphorothioate linkage
  modified_base 18: mod_base = OTHER; note = 2'-O-methoxyethyl modified nucleotide with phosphorothioate linkage
  modified_base 19: mod_base = OTHER; note = 2'-O-methoxyethyl 5-methylcytosine with phosphorothioate linkage
  modified_base 20: mod_base = OTHER; note = 2'-O-methoxyethyl 5-methylcytosine
aaacgagggtcagctcggcc

SEQ ID NO: 199 - RNA, 20 nt, synthetic construct
  source 1..20: mol_type = other RNA
  modified_base 1: mod_base = OTHER; note = 2'-O-methoxyethyl modified nucleotide with phosphorothioate linkage
  modified_base 2: mod_base = OTHER; note = 2'-O-methoxyethyl modified nucleotide with phosphorothioate linkage
  modified_base 3: mod_base = OTHER; note = 2'-O-methoxyethyl modified nucleotide with phosphorothioate linkage
  modified_base 4: mod_base = OTHER; note = 2'-O-methoxyethyl modified nucleotide with phosphorothioate linkage
  modified_base 5: mod_base = OTHER; note = 2'-O-methoxyethyl modified thymine with phosphorothioate linkage
  modified_base 6: mod_base = OTHER; note = 2'-O-methoxyethyl 5-methylcytosine with phosphorothioate linkage
  modified_base 7: mod_base = OTHER; note = 2'-O-methoxyethyl modified nucleotide with phosphorothioate linkage
  modified_base 8: mod_base = OTHER; note = 2'-O-methoxyethyl modified nucleotide with phosphorothioate linkage
  modified_base 9: mod_base = OTHER; note = 2'-O-methoxyethyl 5-methylcytosine with phosphorothioate linkage
  modified_base 10: mod_base = OTHER; note = 2'-O-methoxyethyl modified thymine with phosphorothioate linkage
  modified_base 11: mod_base = OTHER; note = 2'-O-methoxyethyl 5-methylcytosine with phosphorothioate linkage
  modified_base 12: mod_base = OTHER; note = 2'-O-methoxyethyl modified nucleotide with phosphorothioate linkage
  modified_base 13: mod_base = OTHER; note = 2'-O-methoxyethyl modified nucleotide with phosphorothioate linkage
  modified_base 14: mod_base = OTHER; note = 2'-O-methoxyethyl 5-methylcytosine with phosphorothioate linkage
  modified_base 15: mod_base = OTHER; note = 2'-O-methoxyethyl 5-methylcytosine with phosphorothioate linkage
  modified_base 16: mod_base = OTHER; note = 2'-O-methoxyethyl 5-methylcytosine with phosphorothioate linkage
  modified_base 17: mod_base = OTHER; note = 2'-O-methoxyethyl modified nucleotide with phosphorothioate linkage
  modified_base 18: mod_base = OTHER; note = 2'-O-methoxyethyl modified nucleotide with phosphorothioate linkage
  modified_base 19: mod_base = OTHER; note = 2'-O-methoxyethyl 5-methylcytosine with phosphorothioate linkage
  modified_base 20: mod_base = OTHER; note = 2'-O-methoxyethyl 5-methylcytosine
agggtcagctcggcccagcc

SEQ ID NO: 200 - RNA, 20 nt, synthetic construct
  source 1..20: mol_type = other RNA
  modified_base 1: mod_base = OTHER; note = 2'-O-methoxyethyl 5-methylcytosine with phosphorothioate linkage
  modified_base 2: mod_base = OTHER; note = 2'-O-methoxyethyl modified nucleotide with phosphorothioate linkage
  modified_base 3: mod_base = OTHER; note = 2'-O-methoxyethyl modified nucleotide with phosphorothioate linkage
  modified_base 4: mod_base = OTHER; note = 2'-O-methoxyethyl 5-methylcytosine with phosphorothioate linkage
  modified_base 5: mod_base = OTHER; note = 2'-O-methoxyethyl modified thymine with phosphorothioate linkage
  modified_base 6: mod_base = OTHER; note = 2'-O-methoxyethyl 5-methylcytosine with phosphorothioate linkage
  modified_base 7: mod_base = OTHER; note = 2'-O-methoxyethyl modified nucleotide with phosphorothioate linkage
  modified_base 8: mod_base = OTHER; note = 2'-O-methoxyethyl modified nucleotide with phosphorothioate linkage
  modified_base 9: mod_base = OTHER; note = 2'-O-methoxyethyl 5-methylcytosine with phosphorothioate linkage
  modified_base 10: mod_base = OTHER; note = 2'-O-methoxyethyl 5-methylcytosine with phosphorothioate linkage
  modified_base 11: mod_base = OTHER; note = 2'-O-methoxyethyl 5-methylcytosine with phosphorothioate linkage
  modified_base 12: mod_base = OTHER; note = 2'-O-methoxyethyl modified nucleotide with phosphorothioate linkage
  modified_base 13: mod_base = OTHER; note = 2'-O-methoxyethyl modified nucleotide with phosphorothioate linkage
  modified_base 14: mod_base = OTHER; note = 2'-O-methoxyethyl 5-methylcytosine with phosphorothioate linkage
  modified_base 15: mod_base = OTHER; note = 2'-O-methoxyethyl 5-methylcytosine with phosphorothioate linkage
  modified_base 16: mod_base = OTHER; note = 2'-O-methoxyethyl 5-methylcytosine with phosphorothioate linkage
  modified_base 17: mod_base = OTHER; note = 2'-O-methoxyethyl modified nucleotide with phosphorothioate linkage
  modified_base 18: mod_base = OTHER; note = 2'-O-methoxyethyl modified nucleotide with phosphorothioate linkage
  modified_base 19: mod_base = OTHER; note = 2'-O-methoxyethyl 5-methylcytosine with phosphorothioate linkage
  modified_base 20: mod_base = OTHER; note = 2'-O-methoxyethyl modified nucleotide
cagctcggcccagcccgaca

SEQ ID NO: 201 - RNA, 20 nt, synthetic construct
  source 1..20: mol_type = other RNA
  modified_base 1: mod_base = OTHER; note = 2'-O-methoxyethyl 5-methylcytosine with phosphorothioate linkage
  modified_base 2: mod_base = OTHER; note = 2'-O-methoxyethyl modified nucleotide with phosphorothioate linkage
  modified_base 3: mod_base = OTHER; note = 2'-O-methoxyethyl modified nucleotide with phosphorothioate linkage
  modified_base 4: mod_base = OTHER; note = 2'-O-methoxyethyl 5-methylcytosine with phosphorothioate linkage
  modified_base 5: mod_base = OTHER; note = 2'-O-methoxyethyl 5-methylcytosine with phosphorothioate linkage
  modified_base 6: mod_base = OTHER; note = 2'-O-methoxyethyl 5-methylcytosine with phosphorothioate linkage
  modified_base 7: mod_base = OTHER; note = 2'-O-methoxyethyl modified nucleotide with phosphorothioate linkage
  modified_base 8: mod_base = OTHER; note = 2'-O-methoxyethyl modified nucleotide with phosphorothioate linkage
  modified_base 9: mod_base = OTHER; note = 2'-O-methoxyethyl 5-methylcytosine with phosphorothioate linkage
  modified_base 10: mod_base = OTHER; note = 2'-O-methoxyethyl 5-methylcytosine with phosphorothioate linkage
  modified_base 11: mod_base = OTHER; note = 2'-O-methoxyethyl 5-methylcytosine with phosphorothioate linkage
  modified_base 12: mod_base = OTHER; note = 2'-O-methoxyethyl modified nucleotide with phosphorothioate linkage
  modified_base 13: mod_base = OTHER; note = 2'-O-methoxyethyl modified nucleotide with phosphorothioate linkage
  modified_base 14: mod_base = OTHER; note = 2'-O-methoxyethyl 5-methylcytosine with phosphorothioate linkage
  modified_base 15: mod_base = OTHER; note = 2'-O-methoxyethyl modified nucleotide with phosphorothioate linkage
  modified_base 16: mod_base = OTHER; note = 2'-O-methoxyethyl modified nucleotide with phosphorothioate linkage
  modified_base 17: mod_base = OTHER; note = 2'-O-methoxyethyl 5-methylcytosine with phosphorothioate linkage
  modified_base 18: mod_base = OTHER; note = 2'-O-methoxyethyl 5-methylcytosine with phosphorothioate linkage
  modified_base 19: mod_base = OTHER; note = 2'-O-methoxyethyl 5-methylcytosine with phosphorothioate linkage
  modified_base 20: mod_base = OTHER; note = 2'-O-methoxyethyl 5-methylcytosine
cggcccagcccgacaacccc

SEQ ID NO: 202 - RNA, 20 nt, synthetic construct
  source 1..20: mol_type = other RNA
  modified_base 1: mod_base = OTHER; note = 2'-O-methoxyethyl 5-methylcytosine with phosphorothioate linkage
  modified_base 2: mod_base = OTHER; note = 2'-O-methoxyethyl modified nucleotide with phosphorothioate linkage
  modified_base 3: mod_base = OTHER; note = 2'-O-methoxyethyl modified nucleotide with phosphorothioate linkage
  modified_base 4: mod_base = OTHER; note = 2'-O-methoxyethyl 5-methylcytosine with phosphorothioate linkage
  modified_base 5: mod_base = OTHER; note = 2'-O-methoxyethyl 5-methylcytosine with phosphorothioate linkage
  modified_base 6: mod_base = OTHER; note = 2'-O-methoxyethyl 5-methylcytosine with phosphorothioate linkage
  modified_base 7: mod_base = OTHER; note = 2'-O-methoxyethyl modified nucleotide with phosphorothioate linkage
  modified_base 8: mod_base = OTHER; note = 2'-O-methoxyethyl modified nucleotide with phosphorothioate linkage
  modified_base 9: mod_base = OTHER; note = 2'-O-methoxyethyl 5-methylcytosine with phosphorothioate linkage
  modified_base 10: mod_base = OTHER; note = 2'-O-methoxyethyl modified nucleotide with phosphorothioate linkage
  modified_base 11: mod_base = OTHER; note = 2'-O-methoxyethyl modified nucleotide with phosphorothioate linkage
  modified_base 12: mod_base = OTHER; note = 2'-O-methoxyethyl 5-methylcytosine with phosphorothioate linkage
  modified_base 13: mod_base = OTHER; note = 2'-O-methoxyethyl 5-methylcytosine with phosphorothioate linkage
  modified_base 14: mod_base = OTHER; note = 2'-O-methoxyethyl 5-methylcytosine with phosphorothioate linkage
  modified_base 15: mod_base = OTHER; note = 2'-O-methoxyethyl 5-methylcytosine with phosphorothioate linkage
  modified_base 16: mod_base = OTHER; note = 2'-O-methoxyethyl modified thymine with phosphorothioate linkage
  modified_base 17: mod_base = OTHER; note = 2'-O-methoxyethyl 5-methylcytosine with phosphorothioate linkage
  modified_base 18: mod_base = OTHER; note = 2'-O-methoxyethyl modified thymine with phosphorothioate linkage
  modified_base 19: mod_base = OTHER; note = 2'-O-methoxyethyl 5-methylcytosine with phosphorothioate linkage
  modified_base 20: mod_base = OTHER; note = 2'-O-methoxyethyl 5-methylcytosine
cagcccgacaacccctctcc

SEQ ID NO: 203 - RNA, 20 nt, synthetic construct
  source 1..20: mol_type = other RNA
  modified_base 1: mod_base = OTHER; note = 2'-O-methoxyethyl 5-methylcytosine with phosphorothioate linkage
  modified_base 2: mod_base = OTHER; note = 2'-O-methoxyethyl modified nucleotide with phosphorothioate linkage
  modified_base 3: mod_base = OTHER; note = 2'-O-methoxyethyl modified nucleotide with phosphorothioate linkage
  modified_base 4: mod_base = OTHER; note = 2'-O-methoxyethyl 5-methylcytosine with phosphorothioate linkage
  modified_base 5: mod_base = OTHER; note = 2'-O-methoxyethyl modified nucleotide with phosphorothioate linkage
  modified_base 6: mod_base = OTHER; note = 2'-O-methoxyethyl modified nucleotide with phosphorothioate linkage
  modified_base 7: mod_base = OTHER; note = 2'-O-methoxyethyl 5-methylcytosine with phosphorothioate linkage
  modified_base 8: mod_base = OTHER; note = 2'-O-methoxyethyl 5-methylcytosine with phosphorothioate linkage
  modified_base 9: mod_base = OTHER; note = 2'-O-methoxyethyl 5-methylcytosine with phosphorothioate linkage
  modified_base 10: mod_base = OTHER; note = 2'-O-methoxyethyl 5-methylcytosine with phosphorothioate linkage
  modified_base 11: mod_base = OTHER; note = 2'-O-methoxyethyl modified thymine with phosphorothioate linkage
  modified_base 12: mod_base = OTHER; note = 2'-O-methoxyethyl 5-methylcytosine with phosphorothioate linkage
  modified_base 13: mod_base = OTHER; note = 2'-O-methoxyethyl modified thymine with phosphorothioate linkage
  modified_base 14: mod_base = OTHER; note = 2'-O-methoxyethyl 5-methylcytosine with phosphorothioate linkage
  modified_base 15: mod_base = OTHER; note = 2'-O-methoxyethyl 5-methylcytosine with phosphorothioate linkage
  modified_base 16: mod_base = OTHER; note = 2'-O-methoxyethyl 5-methylcytosine with phosphorothioate linkage
  modified_base 17: mod_base = OTHER; note = 2'-O-methoxyethyl 5-methylcytosine with phosphorothioate linkage
  modified_base 18: mod_base = OTHER; note = 2'-O-methoxyethyl modified nucleotide with phosphorothioate linkage
  modified_base 19: mod_base = OTHER; note = 2'-O-methoxyethyl 5-methylcytosine with phosphorothioate linkage
  modified_base 20: mod_base = OTHER; note = 2'-O-methoxyethyl modified nucleotide
cgacaacccctctccccaca

SEQ ID NO: 204 - RNA, 20 nt, synthetic construct
  source 1..20: mol_type = other RNA
  modified_base 1: mod_base = OTHER; note = 2'-O-methoxyethyl modified nucleotide with phosphorothioate linkage
  modified_base 2: mod_base = OTHER; note = 2'-O-methoxyethyl 5-methylcytosine with phosphorothioate linkage
  modified_base 3: mod_base = OTHER; note = 2'-O-methoxyethyl 5-methylcytosine with phosphorothioate linkage
  modified_base 4: mod_base = OTHER; note = 2'-O-methoxyethyl 5-methylcytosine with phosphorothioate linkage
  modified_base 5: mod_base = OTHER; note = 2'-O-methoxyethyl 5-methylcytosine with phosphorothioate linkage
  modified_base 6: mod_base = OTHER; note = 2'-O-methoxyethyl modified thymine with phosphorothioate linkage
  modified_base 7: mod_base = OTHER; note = 2'-O-methoxyethyl 5-methylcytosine with phosphorothioate linkage
  modified_base 8: mod_base = OTHER; note = 2'-O-methoxyethyl modified thymine with phosphorothioate linkage
  modified_base 9: mod_base = OTHER; note = 2'-O-methoxyethyl 5-methylcytosine with phosphorothioate linkage
  modified_base 10: mod_base = OTHER; note = 2'-O-methoxyethyl 5-methylcytosine with phosphorothioate linkage
  modified_base 11: mod_base = OTHER; note = 2'-O-methoxyethyl 5-methylcytosine with phosphorothioate linkage
  modified_base 12: mod_base = OTHER; note = 2'-O-methoxyethyl 5-methylcytosine with phosphorothioate linkage
  modified_base 13: mod_base = OTHER; note = 2'-O-methoxyethyl modified nucleotide with phosphorothioate linkage
  modified_base 14: mod_base = OTHER; note = 2'-O-methoxyethyl 5-methylcytosine with phosphorothioate linkage
  modified_base 15: mod_base = OTHER; note = 2'-O-methoxyethyl modified nucleotide with phosphorothioate linkage
  modified_base 16: mod_base = OTHER; note = 2'-O-methoxyethyl modified nucleotide with phosphorothioate linkage
  modified_base 17: mod_base = OTHER; note = 2'-O-methoxyethyl 5-methylcytosine with phosphorothioate linkage
  modified_base 18: mod_base = OTHER; note = 2'-O-methoxyethyl 5-methylcytosine with phosphorothioate linkage
  modified_base 19: mod_base = OTHER; note = 2'-O-methoxyethyl modified nucleotide with phosphorothioate linkage
  modified_base 20: mod_base = OTHER; note = 2'-O-methoxyethyl 5-methylcytosine
acccctctccccacagccac

SEQ ID NO: 205 - RNA, 20 nt, synthetic construct
  source 1..20: mol_type = other RNA
  modified_base 1: mod_base = OTHER; note = 2'-O-methoxyethyl modified thymine with phosphorothioate linkage
  modified_base 2: mod_base = OTHER; note = 2'-O-methoxyethyl 5-methylcytosine with phosphorothioate linkage
  modified_base 3: mod_base = OTHER; note = 2'-O-methoxyethyl modified thymine with phosphorothioate linkage
  modified_base 4: mod_base = OTHER; note = 2'-O-methoxyethyl 5-methylcytosine with phosphorothioate linkage
  modified_base 5: mod_base = OTHER; note = 2'-O-methoxyethyl 5-methylcytosine with phosphorothioate linkage
  modified_base 6: mod_base = OTHER; note = 2'-O-methoxyethyl 5-methylcytosine with phosphorothioate linkage
  modified_base 7: mod_base = OTHER; note = 2'-O-methoxyethyl 5-methylcytosine with phosphorothioate linkage
  modified_base 8: mod_base = OTHER; note = 2'-O-methoxyethyl modified nucleotide with phosphorothioate linkage
  modified_base 9: mod_base = OTHER; note = 2'-O-methoxyethyl 5-methylcytosine with phosphorothioate linkage
  modified_base 10: mod_base = OTHER; note = 2'-O-methoxyethyl modified nucleotide with phosphorothioate linkage
  modified_base 11: mod_base = OTHER; note = 2'-O-methoxyethyl modified nucleotide with phosphorothioate linkage
  modified_base 12: mod_base = OTHER; note = 2'-O-methoxyethyl 5-methylcytosine with phosphorothioate linkage
  modified_base 13: mod_base = OTHER; note = 2'-O-methoxyethyl 5-methylcytosine with phosphorothioate linkage
  modified_base 14: mod_base = OTHER; note = 2'-O-methoxyethyl modified nucleotide with phosphorothioate linkage
  modified_base 15: mod_base = OTHER; note = 2'-O-methoxyethyl 5-methylcytosine with phosphorothioate linkage
  modified_base 16: mod_base = OTHER; note = 2'-O-methoxyethyl modified thymine with phosphorothioate linkage
  modified_base 17: mod_base = OTHER; note = 2'-O-methoxyethyl 5-methylcytosine with phosphorothioate linkage
  modified_base 18: mod_base = OTHER; note = 2'-O-methoxyethyl modified nucleotide with phosphorothioate linkage
  modified_base 19: mod_base = OTHER; note = 2'-O-methoxyethyl 5-methylcytosine with phosphorothioate linkage
  modified_base 20: mod_base = OTHER; note = 2'-O-methoxyethyl 5-methylcytosine
tctccccacagccactcacc

SEQ ID NO: 206 - RNA, 20 nt, synthetic construct
  source 1..20: mol_type = other RNA
  modified_base 1: mod_base = OTHER; note = 2'-O-methoxyethyl 5-methylcytosine with phosphorothioate linkage
  modified_base 2: mod_base = OTHER; note = 2'-O-methoxyethyl 5-methylcytosine with phosphorothioate linkage
  modified_base 3: mod_base = OTHER; note = 2'-O-methoxyethyl modified nucleotide with phosphorothioate linkage
  modified_base 4: mod_base = OTHER; note = 2'-O-methoxyethyl 5-methylcytosine with phosphorothioate linkage
  modified_base 5: mod_base = OTHER; note = 2'-O-methoxyethyl modified nucleotide with phosphorothioate linkage
  modified_base 6: mod_base = OTHER; note = 2'-O-methoxyethyl modified nucleotide with phosphorothioate linkage
  modified_base 7: mod_base = OTHER; note = 2'-O-methoxyethyl 5-methylcytosine with phosphorothioate linkage
  modified_base 8: mod_base = OTHER; note = 2'-O-methoxyethyl 5-methylcytosine with phosphorothioate linkage
  modified_base 9: mod_base = OTHER; note = 2'-O-methoxyethyl modified nucleotide with phosphorothioate linkage
  modified_base 10: mod_base = OTHER; note = 2'-O-methoxyethyl 5-methylcytosine with phosphorothioate linkage
  modified_base 11: mod_base = OTHER; note = 2'-O-methoxyethyl modified thymine with phosphorothioate linkage
  modified_base 12: mod_base = OTHER; note = 2'-O-methoxyethyl 5-methylcytosine with phosphorothioate linkage
  modified_base 13: mod_base = OTHER; note = 2'-O-methoxyethyl modified nucleotide with phosphorothioate linkage
  modified_base 14: mod_base = OTHER; note = 2'-O-methoxyethyl 5-methylcytosine with phosphorothioate linkage
  modified_base 15: mod_base = OTHER; note = 2'-O-methoxyethyl 5-methylcytosine with phosphorothioate linkage
  modified_base 16: mod_base = OTHER; note = 2'-O-methoxyethyl modified thymine with phosphorothioate linkage
  modified_base 17: mod_base = OTHER; note = 2'-O-methoxyethyl modified nucleotide with phosphorothioate linkage
  modified_base 18: mod_base = OTHER; note = 2'-O-methoxyethyl 5-methylcytosine with phosphorothioate linkage
  modified_base 19: mod_base = OTHER; note = 2'-O-methoxyethyl 5-methylcytosine with phosphorothioate linkage
  modified_base 20: mod_base = OTHER; note = 2'-O-methoxyethyl 5-methylcytosine
ccacagccactcacctgccc

SEQ ID NO: 207 - DNA, 17 bp, synthetic construct
  source 1..17: mol_type = other DNA
cgctgctgctactgctg

SEQ ID NO: 208 - DNA, 20 bp, synthetic construct
  source 1..20: mol_type = other DNA
ttctagagtgccagggatga

SEQ ID NO: 209 - DNA, 22 bp, synthetic construct
  source 1..22: mol_type = other DNA
tgtgggcagacttgacccacag

SEQ ID NO: 210 - DNA, 18 bp, synthetic construct
  source 1..18: mol_type = other DNA
ggatggagagaggaagta

SEQ ID NO: 211 - DNA, 19 bp, synthetic construct
  source 1..19: mol_type = other DNA
gtgccagggatgaggattt

SEQ ID NO: 212 - DNA, 24 bp, synthetic construct
  source 1..24: mol_type = other DNA
tgcatgtgacagacttgacccaca

SEQ ID NO: 213 - DNA, 38 bp, synthetic construct
  source 1..38: mol_type = other DNA
tctccccagctctctgtgcatgtgacaggtgaggcaca

SEQ ID NO: 214 - DNA, 58 bp, synthetic construct
  source 1..58: mol_type = other DNA
taatggttcatacttctttcggatggagagaggaagtaccaaatacagttacaaatct

SEQ ID NO: 215 - DNA, 43 bp, synthetic construct
  source 1..43: mol_type = other DNA
cctcgtgccctgcactttcttccatcccataccctactacgac

SEQ ID NO: 216 - DNA, 43 bp, synthetic construct
  source 1..43: mol_type = other DNA
aggggccctggctatggatccaaatttctggctgcaagtgcag

SEQ ID NO: 217 - DNA, 45 bp, synthetic construct
  source 1..45: mol_type = other DNA
acagttacaaatctccccagctctctgtgcatgtgacaggtgagg

SEQ ID NO: 218 - DNA, 40 bp, synthetic construct
  source 1..40: mol_type = other DNA
ggttcatacttctttcggatggagagaggaagtaccaaat

SEQ ID NO: 219 - DNA, 35 bp, synthetic construct
  source 1..35: mol_type = other DNA
gcaggagtcagtgacggtacaggagggtttgtgcg

SEQ ID NO: 220 - DNA, 34 bp, synthetic construct
  source 1..34: mol_type = other DNA
ggccgagctgaccctcgtttccccacaggggccc

SEQ ID NO: 221 - DNA, 23 bp, synthetic construct
  source 1..23: mol_type = other DNA
  modified_base 1: mod_base = OTHER; note = Sarcosine attached via phosphorodiamidate to nucleotide
  modified_base 1..23: mod_base = OTHER; note = Phosphorodiamidate morpholino backbone
cctcacctgtcacatgcacagag

SEQ ID NO: 222 - DNA, 23 bp, synthetic construct
  source 1..23: mol_type = other DNA
  modified_base 1: mod_base = OTHER; note = Sarcosine attached via phosphorodiamidate to nucleotide
  modified_base 1..23: mod_base = OTHER; note = Phosphorodiamidate morpholino backbone
tcacctgtcacatgcacagagag

SEQ ID NO: 223 - DNA, 23 bp, synthetic construct
  source 1..23: mol_type = other DNA
  modified_base 1: mod_base = OTHER; note = Sarcosine attached via phosphorodiamidate to nucleotide
  modified_base 1..23: mod_base = OTHER; note = Phosphorodiamidate morpholino backbone
ctcacctgtcacatgcacagaga

SEQ ID NO: 224 - DNA, 21 bp, synthetic construct
  source 1..21: mol_type = other DNA
  modified_base 1: mod_base = OTHER; note = Sarcosine attached via phosphorodiamidate to nucleotide
  modified_base 1..21: mod_base = OTHER; note = Phosphorodiamidate morpholino backbone
cctcacctgtcacatgcacag

SEQ ID NO: 225 - DNA, 21 bp, synthetic construct
  source 1..21: mol_type = other DNA
  modified_base 1: mod_base = OTHER; note = Sarcosine attached via phosphorodiamidate to nucleotide
  modified_base 1..21: mod_base = OTHER; note = Phosphorodiamidate morpholino backbone
acctgtcacatgcacagagag

SEQ ID NO: 226 - DNA, 21 bp, synthetic construct
  source 1..21: mol_type = other DNA
  modified_base 1: mod_base = OTHER; note = Sarcosine attached via phosphorodiamidate to nucleotide
  modified_base 1..21: mod_base = OTHER; note = Phosphorodiamidate morpholino backbone
tcacctgtcacatgcacagag

SEQ ID NO: 227 - DNA, 25 bp, synthetic construct
  source 1..25: mol_type = other DNA
  modified_base 1: mod_base = OTHER; note = Sarcosine attached via phosphorodiamidate to nucleotide
  modified_base 1..25: mod_base = OTHER; note = Phosphorodiamidate morpholino backbone
tcacctgtcacatgcacagagagct

SEQ ID NO: 228 - DNA, 25 bp, synthetic construct
  source 1..25: mol_type = other DNA
  modified_base 1: mod_base = OTHER; note = Sarcosine attached via phosphorodiamidate to nucleotide
  modified_base 1..25: mod_base = OTHER; note = Phosphorodiamidate morpholino backbone
cctgtgcctcacctgtcacatgcac

SEQ ID NO: 229 - DNA, 25 bp, synthetic construct
  source 1..25: mol_type = other DNA
  modified_base 1: mod_base = OTHER; note = Sarcosine attached via phosphorodiamidate to nucleotide
  modified_base 1..25: mod_base = OTHER; note = Phosphorodiamidate morpholino backbone
gtgcctcacctgtcacatgcacaga

SEQ ID NO: 230 - DNA, 25 bp, synthetic construct
  source 1..25: mol_type = other DNA
  modified_base 1: mod_base = OTHER; note = Sarcosine attached via phosphorodiamidate to nucleotide
  modified_base 1..25: mod_base = OTHER; note = Phosphorodiamidate morpholino backbone
tgcctcacctgtcacatgcacagag

SEQ ID NO: 231 - DNA, 25 bp, synthetic construct
  source 1..25: mol_type = other DNA
  modified_base 1: mod_base = OTHER; note = Sarcosine attached via phosphorodiamidate to nucleotide
  modified_base 1..25: mod_base = OTHER; note = Phosphorodiamidate morpholino backbone
ctcacctgtcacatgcacagagagc

SEQ ID NO: 232 - DNA, 25 bp, synthetic construct
  source 1..25: mol_type = other DNA
  modified_base 1: mod_base = OTHER; note = Sarcosine attached via phosphorodiamidate to nucleotide
  modified_base 1..25: mod_base = OTHER; note = Phosphorodiamidate morpholino backbone
cacctgtcacatgcacagagagctg

SEQ ID NO: 233 - DNA, 25 bp, synthetic construct
  source 1..25: mol_type = other DNA
  modified_base 1: mod_base = OTHER; note = Sarcosine attached via phosphorodiamidate to nucleotide
  modified_base 1..25: mod_base = OTHER; note = Phosphorodiamidate morpholino backbone
acctgtcacatgcacagagagctgg

SEQ ID NO: 234 - DNA, 25 bp, synthetic construct
  source 1..25: mol_type = other DNA
  modified_base 1: mod_base = OTHER; note = Sarcosine attached via phosphorodiamidate to nucleotide
  modified_base 1..25: mod_base = OTHER; note = Phosphorodiamidate morpholino backbone
ctgtcacatgcacagagagctgggg

SEQ ID NO: 235 - DNA, 23 bp, synthetic construct
  source 1..23: mol_type = other DNA
  modified_base 1: mod_base = OTHER; note = Sarcosine attached via phosphorodiamidate to nucleotide
  modified_base 1..23: mod_base = OTHER; note = Phosphorodiamidate morpholino backbone
cctgtcacatgcacagagagctg

SEQ ID NO: 236 - DNA, 23 bp, synthetic construct
  source 1..23: mol_type = other DNA
  modified_base 1: mod_base = OTHER; note = Sarcosine attached via phosphorodiamidate to nucleotide
  modified_base 1..23: mod_base = OTHER; note = Phosphorodiamidate morpholino backbone
tgtcacatgcacagagagctggg

SEQ ID NO: 237 - DNA, 23 bp, synthetic construct
  source 1..23: mol_type = other DNA
  modified_base 1: mod_base = OTHER; note = Sarcosine attached via phosphorodiamidate to nucleotide
  modified_base 1..23: mod_base = OTHER; note = Phosphorodiamidate morpholino backbone
ctgtcacatgcacagagagctgg

SEQ ID NO: 238 - DNA, 22 bp, synthetic construct
  source 1..22: mol_type = other DNA
  modified_base 1: mod_base = OTHER; note = Sarcosine attached via phosphorodiamidate to nucleotide
  modified_base 1..22: mod_base = OTHER; note = Phosphorodiamidate morpholino backbone
tgtcacatgcacagagagctgg

SEQ ID NO: 239 - DNA, 21 bp, synthetic construct
  source 1..21: mol_type = other DNA
  modified_base 1: mod_base = OTHER; note = Sarcosine attached via phosphorodiamidate to nucleotide
  modified_base 1..21: mod_base = OTHER; note = Phosphorodiamidate morpholino backbone
tcacatgcacagagagctggg

SEQ ID NO: 240 - DNA, 21 bp, synthetic construct
  source 1..21: mol_type = other DNA
  modified_base 1: mod_base = OTHER; note = Sarcosine attached via phosphorodiamidate to nucleotide
  modified_base 1..21: mod_base = OTHER; note = Phosphorodiamidate morpholino backbone
tgtcacatgcacagagagctg

SEQ ID NO: 241 - DNA, 25 bp, synthetic construct
  source 1..25: mol_type = other DNA
  modified_base 1: mod_base = OTHER; note = Sarcosine attached via phosphorodiamidate to nucleotide
  modified_base 1..25: mod_base = OTHER; note = Phosphorodiamidate morpholino backbone
ctgtatttggtacttcctctctcca

SEQ ID NO: 242 - DNA, 25 bp, synthetic construct
  source 1..25: mol_type = other DNA
  modified_base 1: mod_base = OTHER; note = Sarcosine attached via phosphorodiamidate to nucleotide
  modified_base 1..25: mod_base = OTHER; note = Phosphorodiamidate morpholino backbone
tgtatttggtacttcctctctccat

SEQ ID NO: 243 - DNA, 25 bp, synthetic construct
  source 1..25: mol_type = other DNA
  modified_base 1: mod_base = OTHER; note = Sarcosine attached via phosphorodiamidate to nucleotide
  modified_base 1..25: mod_base = OTHER; note = Phosphorodiamidate morpholino backbone
gtatttggtacttcctctctccatc

SEQ ID NO: 244 - DNA, 25 bp, synthetic construct
  source 1..25: mol_type = other DNA
  modified_base 1: mod_base = OTHER; note = Sarcosine attached via phosphorodiamidate to nucleotide
  modified_base 1..25: mod_base = OTHER; note = Phosphorodiamidate morpholino backbone
tatttggtacttcctctctccatcc

SEQ ID NO: 245 - RNA, 20 nt, synthetic construct
  source 1..20: mol_type = other RNA
  modified_base 1: mod_base = OTHER; note = 2'-O-methoxyethyl 5-methylcytosine with phosphorothioate linkage
  modified_base 2: mod_base = OTHER; note = 2'-O-methoxyethyl modified thymine with phosphorothioate linkage
  modified_base 3: mod_base = OTHER; note = 2'-O-methoxyethyl 5-methylcytosine with phosphorothioate linkage
  modified_base 4: mod_base = OTHER; note = 2'-O-methoxyethyl 5-methylcytosine with phosphorothioate linkage
  modified_base 5: mod_base = OTHER; note = 2'-O-methoxyethyl modified nucleotide with phosphorothioate linkage
  modified_base 6: mod_base = OTHER; note = 2'-O-methoxyethyl modified thymine with phosphorothioate linkage
  modified_base 7: mod_base = OTHER; note = 2'-O-methoxyethyl 5-methylcytosine with phosphorothioate linkage
  modified_base 8: mod_base = OTHER; note = 2'-O-methoxyethyl 5-methylcytosine with phosphorothioate linkage
  modified_base 9: mod_base = OTHER; note = 2'-O-methoxyethyl modified nucleotide with phosphorothioate linkage
  modified_base 10: mod_base = OTHER; note = 2'-O-methoxyethyl modified nucleotide with phosphorothioate linkage
  modified_base 11: mod_base = OTHER; note = 2'-O-methoxyethyl modified nucleotide with phosphorothioate linkage
  modified_base 12: mod_base = OTHER; note = 2'-O-methoxyethyl modified nucleotide with phosphorothioate linkage
  modified_base 13: mod_base = OTHER; note = 2'-O-methoxyethyl modified nucleotide with phosphorothioate linkage
  modified_base 14: mod_base = OTHER; note = 2'-O-methoxyethyl modified nucleotide with phosphorothioate linkage
  modified_base 15: mod_base = OTHER; note = 2'-O-methoxyethyl modified nucleotide with phosphorothioate linkage
  modified_base 16: mod_base = OTHER; note = 2'-O-methoxyethyl modified nucleotide with phosphorothioate linkage
  modified_base 17: mod_base = OTHER; note = 2'-O-methoxyethyl modified thymine with phosphorothioate linkage
  modified_base 18: mod_base = OTHER; note = 2'-O-methoxyethyl modified nucleotide with phosphorothioate linkage
  modified_base 19: mod_base = OTHER; note = 2'-O-methoxyethyl modified thymine with phosphorothioate linkage
  modified_base 20: mod_base = OTHER; note = 2'-O-methoxyethyl modified nucleotide
ctccatccgaaagaagtatg

SEQ ID NO: 246 - RNA, 20 nt, synthetic construct
  source 1..20: mol_type = other RNA
  modified_base 1: mod_base = OTHER; note = 2'-O-methoxyethyl modified thymine with phosphorothioate linkage
  modified_base 2: mod_base = OTHER; note = 2'-O-methoxyethyl 5-methylcytosine with phosphorothioate linkage
  modified_base 3: mod_base = OTHER; note = 2'-O-methoxyethyl 5-methylcytosine with phosphorothioate linkage
  modified_base 4: mod_base = OTHER; note = 2'-O-methoxyethyl modified nucleotide with phosphorothioate linkage
  modified_base 5: mod_base = OTHER; note = 2'-O-methoxyethyl modified thymine with phosphorothioate linkage
  modified_base 6: mod_base = OTHER; note = 2'-O-methoxyethyl 5-methylcytosine with phosphorothioate linkage
  modified_base 7: mod_base = OTHER; note = 2'-O-methoxyethyl 5-methylcytosine with phosphorothioate linkage
  modified_base 8: mod_base = OTHER; note = 2'-O-methoxyethyl modified nucleotide with phosphorothioate linkage
  modified_base 9: mod_base = OTHER; note = 2'-O-methoxyethyl modified nucleotide with phosphorothioate linkage
  modified_base 10: mod_base = OTHER; note = 2'-O-methoxyethyl modified nucleotide with phosphorothioate linkage
  modified_base 11: mod_base = OTHER; note = 2'-O-methoxyethyl modified nucleotide with phosphorothioate linkage
  modified_base 12: mod_base = OTHER; note = 2'-O-methoxyethyl modified nucleotide with phosphorothioate linkage
  modified_base 13: mod_base = OTHER; note = 2'-O-methoxyethyl modified nucleotide with phosphorothioate linkage
  modified_base 14: mod_base = OTHER; note = 2'-O-methoxyethyl modified nucleotide with phosphorothioate linkage
  modified_base 15: mod_base = OTHER; note = 2'-O-methoxyethyl modified nucleotide with phosphorothioate linkage
  modified_base 16: mod_base = OTHER; note = 2'-O-methoxyethyl modified thymine with phosphorothioate linkage
  modified_base 17: mod_base = OTHER; note = 2'-O-methoxyethyl modified nucleotide with phosphorothioate linkage
  modified_base 18: mod_base = OTHER; note = 2'-O-methoxyethyl modified thymine with phosphorothioate linkage
  modified_base 19: mod_base = OTHER; note = 2'-O-methoxyethyl modified nucleotide with phosphorothioate linkage
  modified_base 20: mod_base = OTHER; note = 2'-O-methoxyethyl modified nucleotide
tccatccgaaagaagtatga

SEQ ID NO: 247 - RNA, 20 nt, synthetic construct
  source 1..20: mol_type = other RNA
  modified_base 1: mod_base = OTHER; note = 2'-O-methoxyethyl 5-methylcytosine with phosphorothioate linkage
  modified_base 2: mod_base = OTHER; note = 2'-O-methoxyethyl 5-methylcytosine with phosphorothioate linkage
  modified_base 3: mod_base = OTHER; note = 2'-O-methoxyethyl modified nucleotide with phosphorothioate linkage
  modified_base 4: mod_base = OTHER; note = 2'-O-methoxyethyl modified thymine with phosphorothioate linkage
  modified_base 5: mod_base = OTHER; note = 2'-O-methoxyethyl 5-methylcytosine with phosphorothioate linkage
  modified_base 6: mod_base = OTHER; note = 2'-O-methoxyethyl 5-methylcytosine with phosphorothioate linkage
  modified_base 7: mod_base = OTHER; note = 2'-O-methoxyethyl modified nucleotide with phosphorothioate linkage
  modified_base 8: mod_base = OTHER; note = 2'-O-methoxyethyl modified nucleotide with phosphorothioate linkage
  modified_base 9: mod_base = OTHER; note = 2'-O-methoxyethyl modified nucleotide with phosphorothioate linkage
  modified_base 10: mod_base = OTHER; note = 2'-O-methoxyethyl modified nucleotide with phosphorothioate linkage
  modified_base 11: mod_base = OTHER; note = 2'-O-methoxyethyl modified nucleotide with phosphorothioate linkage
  modified_base 12: mod_base = OTHER; note = 2'-O-methoxyethyl modified nucleotide with phosphorothioate linkage
  modified_base 13: mod_base = OTHER; note = 2'-O-methoxyethyl modified nucleotide with phosphorothioate linkage
  modified_base 14: mod_base = OTHER; note = 2'-O-methoxyethyl modified nucleotide with phosphorothioate linkage
  modified_base 15: mod_base = OTHER; note = 2'-O-methoxyethyl modified thymine with phosphorothioate linkage
  modified_base 16: mod_base = OTHER; note = 2'-O-methoxyethyl modified nucleotide with phosphorothioate linkage
  modified_base 17: mod_base = OTHER; note = 2'-O-methoxyethyl modified thymine with phosphorothioate linkage
  modified_base 18: mod_base = OTHER; note = 2'-O-methoxyethyl modified nucleotide with phosphorothioate linkage
  modified_base 19: mod_base = OTHER; note = 2'-O-methoxyethyl modified nucleotide with phosphorothioate linkage
  modified_base 20: mod_base = OTHER; note = 2'-O-methoxyethyl modified nucleotide
ccatccgaaagaagtatgaa

SEQ ID NO: 248 - RNA, 20 nt, synthetic construct
  source 1..20: mol_type = other RNA
  modified_base 1: mod_base = OTHER; note = 2'-O-methoxyethyl 5-methylcytosine with phosphorothioate linkage
  modified_base 2: mod_base = OTHER; note = 2'-O-methoxyethyl modified nucleotide with phosphorothioate linkage
  modified_base 3: mod_base = OTHER; note = 2'-O-methoxyethyl modified thymine with phosphorothioate linkage
  modified_base 4: mod_base = OTHER; note = 2'-O-methoxyethyl 5-methylcytosine with phosphorothioate linkage
  modified_base 5: mod_base = OTHER; note = 2'-O-methoxyethyl 5-methylcytosine with phosphorothioate linkage
  modified_base 6: mod_base = OTHER; note = 2'-O-methoxyethyl modified nucleotide with phosphorothioate linkage
  modified_base 7: mod_base = OTHER; note = 2'-O-methoxyethyl modified nucleotide with phosphorothioate linkage
  modified_base 8: mod_base = OTHER; note = 2'-O-methoxyethyl modified nucleotide with phosphorothioate linkage
  modified_base 9: mod_base = OTHER; note = 2'-O-methoxyethyl modified nucleotide with phosphorothioate linkage
  modified_base 10: mod_base = OTHER; note = 2'-O-methoxyethyl modified nucleotide with phosphorothioate linkage
  modified_base 11: mod_base = OTHER; note = 2'-O-methoxyethyl modified nucleotide with phosphorothioate linkage
  modified_base 12: mod_base = OTHER; note = 2'-O-methoxyethyl modified nucleotide with phosphorothioate linkage
  modified_base 13: mod_base = OTHER; note = 2'-O-methoxyethyl modified nucleotide with phosphorothioate linkage
  modified_base 14: mod_base = OTHER; note = 2'-O-methoxyethyl modified thymine with phosphorothioate linkage
  modified_base 15: mod_base = OTHER; note = 2'-O-methoxyethyl modified nucleotide with phosphorothioate linkage
  modified_base 16: mod_base = OTHER; note = 2'-O-methoxyethyl modified thymine with phosphorothioate linkage
  modified_base 17: mod_base = OTHER; note = 2'-O-methoxyethyl modified nucleotide with phosphorothioate linkage
  modified_base 18: mod_base = OTHER; note = 2'-O-methoxyethyl modified nucleotide with phosphorothioate linkage
  modified_base 19: mod_base = OTHER; note = 2'-O-methoxyethyl modified nucleotide with phosphorothioate linkage
  modified_base 20: mod_base = OTHER; note = 2'-O-methoxyethyl 5-methylcytosine
catccgaaagaagtatgaac

SEQ ID NO: 249 - RNA, 20 nt, synthetic construct
  source 1..20: mol_type = other RNA
  modified_base 1: mod_base = OTHER; note = 2'-O-methoxyethyl modified thymine with phosphorothioate linkage
  modified_base 2: mod_base = OTHER; note = 2'-O-methoxyethyl 5-methylcytosine with phosphorothioate linkage
  modified_base 3: mod_base = OTHER; note = 2'-O-methoxyethyl 5-methylcytosine with phosphorothioate linkage
  modified_base 4: mod_base = OTHER; note = 2'-O-methoxyethyl modified nucleotide with phosphorothioate linkage
  modified_base 5: mod_base = OTHER; note = 2'-O-methoxyethyl modified nucleotide with phosphorothioate linkage
  modified_base 6: mod_base = OTHER; note = 2'-O-methoxyethyl modified nucleotide with phosphorothioate linkage
  modified_base 7: mod_base = OTHER; note = 2'-O-methoxyethyl modified nucleotide with phosphorothioate linkage
  modified_base 8: mod_base = OTHER; note = 2'-O-methoxyethyl modified nucleotide with phosphorothioate linkage
  modified_base 9: mod_base = OTHER; note = 2'-O-methoxyethyl modified nucleotide with phosphorothioate linkage
  modified_base 10: mod_base = OTHER; note = 2'-O-methoxyethyl modified nucleotide with phosphorothioate linkage
  modified_base 11: mod_base = OTHER; note = 2'-O-methoxyethyl modified nucleotide with phosphorothioate linkage
  modified_base 12: mod_base = OTHER; note = 2'-O-methoxyethyl modified thymine with phosphorothioate linkage
  modified_base 13: mod_base = OTHER; note = 2'-O-methoxyethyl modified nucleotide with phosphorothioate linkage
  modified_base 14: mod_base = OTHER; note = 2'-O-methoxyethyl modified thymine with phosphorothioate linkage
  modified_base 15: mod_base = OTHER; note = 2'-O-methoxyethyl modified nucleotide with phosphorothioate linkage
  modified_base 16: mod_base = OTHER; note = 2'-O-methoxyethyl modified nucleotide with phosphorothioate linkage
  modified_base 17: mod_base = OTHER; note = 2'-O-methoxyethyl modified nucleotide with phosphorothioate linkage
  modified_base 18: mod_base = OTHER; note = 2'-O-methoxyethyl 5-methylcytosine with phosphorothioate linkage
  modified_base 19: mod_base = OTHER; note = 2'-O-methoxyethyl 5-methylcytosine with phosphorothioate linkage
  modified_base 20: mod_base = OTHER; note = 2'-O-methoxyethyl modified nucleotide
tccgaaagaagtatgaacca

SEQ ID NO: 250 - RNA, 20 nt, synthetic construct
  source 1..20: mol_type = other RNA
  modified_base 1: mod_base = OTHER; note = 2'-O-methoxyethyl 5-methylcytosine with phosphorothioate linkage
  modified_base 2: mod_base = OTHER; note = 2'-O-methoxyethyl 5-methylcytosine with phosphorothioate linkage
  modified_base 3: mod_base = OTHER; note = 2'-O-methoxyethyl modified nucleotide with phosphorothioate linkage
  modified_base 4: mod_base = OTHER; note = 2'-O-methoxyethyl modified nucleotide with phosphorothioate linkage
  modified_base 5: mod_base = OTHER; note = 2'-O-methoxyethyl modified nucleotide with phosphorothioate linkage
  modified_base 6: mod_base = OTHER; note = 2'-O-methoxyethyl modified nucleotide with phosphorothioate linkage
  modified_base 7: mod_base = OTHER; note = 2'-O-methoxyethyl modified nucleotide with phosphorothioate linkage
  modified_base 8: mod_base = OTHER; note = 2'-O-methoxyethyl modified nucleotide with phosphorothioate linkage
  modified_base 9: mod_base = OTHER; note = 2'-O-methoxyethyl modified nucleotide with phosphorothioate linkage
  modified_base 10: mod_base = OTHER; note = 2'-O-methoxyethyl modified nucleotide with phosphorothioate linkage
  modified_base 11: mod_base = OTHER; note = 2'-O-methoxyethyl modified thymine with phosphorothioate linkage
  modified_base 12: mod_base = OTHER; note = 2'-O-methoxyethyl modified nucleotide with phosphorothioate linkage
  modified_base 13: mod_base = OTHER; note = 2'-O-methoxyethyl modified thymine with phosphorothioate linkage
  modified_base 14: mod_base = OTHER; note = 2'-O-methoxyethyl modified nucleotide with phosphorothioate linkage
  modified_base 15: mod_base = OTHER; note = 2'-O-methoxyethyl modified nucleotide with phosphorothioate linkage
  modified_base 16: mod_base = OTHER; note = 2'-O-methoxyethyl modified nucleotide with phosphorothioate linkage
  modified_base 17: mod_base = OTHER; note = 2'-O-methoxyethyl 5-methylcytosine with phosphorothioate linkage
  modified_base 18: mod_base = OTHER; note = 2'-O-methoxyethyl 5-methylcytosine with phosphorothioate linkage
  modified_base 19: mod_base = OTHER; note = 2'-O-methoxyethyl modified nucleotide with phosphorothioate linkage
  modified_base 20: mod_base = OTHER; note = 2'-O-methoxyethyl modified thymine
ccgaaagaagtatgaaccat

SEQ ID NO: 251 - RNA, 18 nt, synthetic construct
  source 1..18: mol_type = other RNA
  modified_base 1: mod_base = OTHER; note = 2'-O-methoxyethyl modified nucleotide with phosphorothioate linkage
  modified_base 2: mod_base = OTHER; note = 2'-O-methoxyethyl modified thymine with phosphorothioate linkage
  modified_base 3: mod_base = OTHER; note = 2'-O-methoxyethyl 5-methylcytosine with phosphorothioate linkage
  modified_base 4: mod_base = OTHER; note = 2'-O-methoxyethyl 5-methylcytosine with phosphorothioate linkage
  modified_base 5: mod_base = OTHER; note = 2'-O-methoxyethyl modified nucleotide with phosphorothioate linkage
  modified_base 6: mod_base = OTHER; note = 2'-O-methoxyethyl modified nucleotide with phosphorothioate linkage
  modified_base 7: mod_base = OTHER; note = 2'-O-methoxyethyl modified nucleotide with phosphorothioate linkage
  modified_base 8: mod_base = OTHER; note = 2'-O-methoxyethyl modified nucleotide with phosphorothioate linkage
  modified_base 9: mod_base = OTHER; note = 2'-O-methoxyethyl modified nucleotide with phosphorothioate linkage
  modified_base 10: mod_base = OTHER; note = 2'-O-methoxyethyl modified nucleotide with phosphorothioate linkage
  modified_base 11: mod_base = OTHER; note = 2'-O-methoxyethyl modified nucleotide with phosphorothioate linkage
  modified_base 12: mod_base = OTHER; note = 2'-O-methoxyethyl modified nucleotide with phosphorothioate linkage
  modified_base 13: mod_base = OTHER; note = 2'-O-methoxyethyl modified thymine with phosphorothioate linkage
  modified_base 14: mod_base = OTHER; note = 2'-O-methoxyethyl modified nucleotide with phosphorothioate linkage
  modified_base 15: mod_base = OTHER; note = 2'-O-methoxyethyl modified thymine with phosphorothioate linkage
  modified_base 16: mod_base = OTHER; note = 2'-O-methoxyethyl modified nucleotide with phosphorothioate linkage
  modified_base 17: mod_base = OTHER; note = 2'-O-methoxyethyl modified nucleotide with phosphorothioate linkage
  modified_base 18: mod_base = OTHER; note = 2'-O-methoxyethyl modified nucleotide
atccgaaagaagtatgaa

SEQ ID NO: 252 - RNA, 18 nt, synthetic construct
  source 1..18: mol_type = other RNA
  modified_base 1: mod_base = OTHER; note = 2'-O-methoxyethyl 5-methylcytosine with phosphorothioate linkage
  modified_base 2: mod_base = OTHER; note = 2'-O-methoxyethyl 5-methylcytosine with phosphorothioate linkage
  modified_base 3: mod_base = OTHER; note = 2'-O-methoxyethyl modified nucleotide with phosphorothioate linkage
  modified_base 4: mod_base = OTHER; note = 2'-O-methoxyethyl modified nucleotide with phosphorothioate linkage
  modified_base 5: mod_base = OTHER; note = 2'-O-methoxyethyl modified nucleotide with phosphorothioate linkage
  modified_base 6: mod_base = OTHER; note = 2'-O-methoxyethyl modified nucleotide with phosphorothioate linkage
  modified_base 7: mod_base = OTHER; note = 2'-O-methoxyethyl modified nucleotide with phosphorothioate linkage
  modified_base 8: mod_base = OTHER; note = 2'-O-methoxyethyl modified nucleotide with phosphorothioate linkage
  modified_base 9: mod_base = OTHER; note = 2'-O-methoxyethyl modified nucleotide with phosphorothioate linkage
  modified_base 10: mod_base = OTHER; note = 2'-O-methoxyethyl modified nucleotide with phosphorothioate linkage
  modified_base 11: mod_base = OTHER; note = 2'-O-methoxyethyl modified thymine with phosphorothioate linkage
  modified_base 12: mod_base = OTHER; note = 2'-O-methoxyethyl modified nucleotide with phosphorothioate linkage
  modified_base 13: mod_base = OTHER; note = 2'-O-methoxyethyl modified thymine with phosphorothioate linkage
  modified_base 14: mod_base = OTHER; note = 2'-O-methoxyethyl modified nucleotide with phosphorothioate linkage
  modified_base 15: mod_base = OTHER; note = 2'-O-methoxyethyl modified nucleotide with phosphorothioate linkage
  modified_base 16: mod_base = OTHER; note = 2'-O-methoxyethyl modified nucleotide with phosphorothioate linkage
  modified_base 17: mod_base = OTHER; note = 2'-O-methoxyethyl 5-methylcytosine with phosphorothioate linkage
  modified_base 18: mod_base = OTHER; note = 2'-O-methoxyethyl 5-methylcytosine
ccgaaagaagtatgaacc

SEQ ID NO: 253 - RNA, 18 nt, synthetic construct
  source 1..18: mol_type = other RNA
  modified_base 1: mod_base = OTHER; note = 2'-O-methoxyethyl modified thymine with phosphorothioate linkage
  modified_base 2: mod_base = OTHER; note = 2'-O-methoxyethyl 5-methylcytosine with phosphorothioate linkage
  modified_base 3: mod_base = OTHER; note = 2'-O-methoxyethyl 5-methylcytosine with phosphorothioate linkage
  modified_base 4: mod_base = OTHER; note = 2'-O-methoxyethyl modified nucleotide with phosphorothioate linkage
  modified_base 5: mod_base = OTHER; note = 2'-O-methoxyethyl modified nucleotide with phosphorothioate linkage
  modified_base 6: mod_base = OTHER; note = 2'-O-methoxyethyl modified nucleotide with phosphorothioate linkage
  modified_base 7: mod_base = OTHER; note = 2'-O-methoxyethyl modified nucleotide with phosphorothioate linkage
  modified_base 8: mod_base = OTHER; note = 2'-O-methoxyethyl modified nucleotide with phosphorothioate linkage
  modified_base 9: mod_base = OTHER; note = 2'-O-methoxyethyl modified nucleotide with phosphorothioate linkage
  modified_base 10: mod_base = OTHER; note = 2'-O-methoxyethyl modified nucleotide with phosphorothioate linkage
  modified_base 11: mod_base = OTHER; note = 2'-O-methoxyethyl modified nucleotide with phosphorothioate linkage
  modified_base 12: mod_base = OTHER; note = 2'-O-methoxyethyl modified thymine with phosphorothioate linkage
  modified_base 13: mod_base = OTHER; note = 2'-O-methoxyethyl modified nucleotide with phosphorothioate linkage
  modified_base 14: mod_base = OTHER; note = 2'-O-methoxyethyl modified thymine with phosphorothioate linkage
  modified_base 15: mod_base = OTHER; note = 2'-O-methoxyethyl modified nucleotide with phosphorothioate linkage
  modified_base 16: mod_base = OTHER; note = 2'-O-methoxyethyl modified nucleotide with phosphorothioate linkage
  modified_base 17: mod_base = OTHER; note = 2'-O-methoxyethyl modified nucleotide with phosphorothioate linkage
  modified_base 18: mod_base = OTHER; note = 2'-O-methoxyethyl 5-methylcytosine
tccgaaagaagtatgaac

SEQ ID NO: 254 - RNA, 18 nt, synthetic construct
  source 1..18: mol_type = other RNA
  modified_base 1: mod_base = OTHER; note = 2'-O-methoxyethyl 5-methylcytosine with phosphorothioate linkage
  modified_base 2: mod_base = OTHER; note = 2'-O-methoxyethyl 5-methylcytosine with phosphorothioate linkage
  modified_base 3: mod_base = OTHER; note = 2'-O-methoxyethyl modified nucleotide with phosphorothioate linkage
  modified_base 4: mod_base = OTHER; note = 2'-O-methoxyethyl modified thymine with phosphorothioate linkage
  modified_base 5: mod_base = OTHER; note = 2'-O-methoxyethyl 5-methylcytosine with phosphorothioate linkage
  modified_base 6: mod_base = OTHER; note = 2'-O-methoxyethyl 5-methylcytosine with phosphorothioate linkage
  modified_base 7: mod_base = OTHER; note = 2'-O-methoxyethyl modified nucleotide with phosphorothioate linkage
  modified_base 8: mod_base = OTHER; note = 2'-O-methoxyethyl modified nucleotide with phosphorothioate linkage
  modified_base 9: mod_base = OTHER; note = 2'-O-methoxyethyl modified nucleotide with phosphorothioate linkage
  modified_base 10: mod_base = OTHER; note = 2'-O-methoxyethyl modified nucleotide with phosphorothioate linkage
  modified_base 11: mod_base = OTHER; note = 2'-O-methoxyethyl modified nucleotide with phosphorothioate linkage
  modified_base 12: mod_base = OTHER; note = 2'-O-methoxyethyl modified nucleotide with phosphorothioate linkage
  modified_base 13: mod_base = OTHER; note = 2'-O-methoxyethyl modified nucleotide with phosphorothioate linkage
  modified_base 14: mod_base = OTHER; note = 2'-O-methoxyethyl modified nucleotide with phosphorothioate linkage
  modified_base 15: mod_base = OTHER; note = 2'-O-methoxyethyl modified thymine with phosphorothioate linkage
  modified_base 16: mod_base = OTHER; note = 2'-O-methoxyethyl modified nucleotide with phosphorothioate linkage
  modified_base 17: mod_base = OTHER; note = 2'-O-methoxyethyl modified thymine with phosphorothioate linkage
  modified_base 18: mod_base = OTHER; note = 2'-O-methoxyethyl modified nucleotide
ccatccgaaagaagtatg

SEQ ID NO: 255 - RNA, 18 nt, synthetic construct
  source 1..18: mol_type = other RNA
  modified_base 1: mod_base = OTHER; note = 2'-O-methoxyethyl modified thymine with phosphorothioate linkage
  modified_base 2: mod_base = OTHER; note = 2'-O-methoxyethyl 5-methylcytosine with phosphorothioate linkage
  modified_base 3: mod_base = OTHER; note = 2'-O-methoxyethyl 5-methylcytosine with phosphorothioate linkage
  modified_base 4: mod_base = OTHER; note = 2'-O-methoxyethyl modified nucleotide with phosphorothioate linkage
  modified_base 5: mod_base = OTHER; note = 2'-O-methoxyethyl modified thymine with phosphorothioate linkage
  modified_base 6: mod_base = OTHER; note = 2'-O-methoxyethyl 5-methylcytosine with phosphorothioate linkage
  modified_base 7: mod_base = OTHER; note = 2'-O-methoxyethyl 5-methylcytosine with phosphorothioate linkage
  modified_base 8: mod_base = OTHER; note = 2'-O-methoxyethyl modified nucleotide with phosphorothioate linkage
  modified_base 9: mod_base = OTHER; note = 2'-O-methoxyethyl modified nucleotide with phosphorothioate linkage
  modified_base 10: mod_base = OTHER; note = 2'-O-methoxyethyl modified nucleotide with phosphorothioate linkage
  modified_base 11: mod_base = OTHER; note = 2'-O-methoxyethyl modified nucleotide with phosphorothioate linkage
  modified_base 12: mod_base = OTHER; note = 2'-O-methoxyethyl modified nucleotide with phosphorothioate linkage
  modified_base 13: mod_base = OTHER; note = 2'-O-methoxyethyl modified nucleotide with phosphorothioate linkage
  modified_base 14: mod_base = OTHER; note = 2'-O-methoxyethyl modified nucleotide with phosphorothioate linkage
  modified_base 15: mod_base = OTHER; note = 2'-O-methoxyethyl modified nucleotide with phosphorothioate linkage
  modified_base 16: mod_base = OTHER; note = 2'-O-methoxyethyl modified thymine with phosphorothioate linkage
  modified_base 17: mod_base = OTHER; note = 2'-O-methoxyethyl modified nucleotide with phosphorothioate linkage
  modified_base 18: mod_base = OTHER; note = 2'-O-methoxyethyl modified thymine
tccatccgaaagaagtat

SEQ ID NO: 256 - RNA, 18 nt, synthetic construct
  source 1..18: mol_type = other RNA
  modified_base 1: mod_base = OTHER; note = 2'-O-methoxyethyl modified nucleotide with phosphorothioate linkage
  modified_base 2: mod_base = OTHER; note = 2'-O-methoxyethyl modified nucleotide with phosphorothioate linkage
  modified_base 3: mod_base = OTHER; note = 2'-O-methoxyethyl modified nucleotide with phosphorothioate linkage
  modified_base 4: mod_base = OTHER; note = 2'-O-methoxyethyl modified nucleotide with phosphorothioate linkage
  modified_base 5: mod_base = OTHER; note = 2'-O-methoxyethyl modified nucleotide with phosphorothioate linkage
  modified_base 6: mod_base = OTHER; note = 2'-O-methoxyethyl modified nucleotide with phosphorothioate linkage
  modified_base 7: mod_base = OTHER; note = 2'-O-methoxyethyl modified nucleotide with phosphorothioate linkage
  modified_base 8: mod_base = OTHER; note = 2'-O-methoxyethyl modified nucleotide with phosphorothioate linkage
  modified_base 9: mod_base = OTHER; note = 2'-O-methoxyethyl modified thymine with phosphorothioate linkage
  modified_base 10: mod_base = OTHER; note = 2'-O-methoxyethyl modified nucleotide with phosphorothioate linkage
  modified_base 11: mod_base = OTHER; note = 2'-O-methoxyethyl modified thymine with phosphorothioate linkage
  modified_base 12: mod_base = OTHER; note = 2'-O-methoxyethyl modified nucleotide with phosphorothioate linkage
  modified_base 13: mod_base = OTHER; note = 2'-O-methoxyethyl modified nucleotide with phosphorothioate linkage
  modified_base 14: mod_base = OTHER; note = 2'-O-methoxyethyl modified nucleotide with phosphorothioate linkage
  modified_base 15: mod_base = OTHER; note = 2'-O-methoxyethyl 5-methylcytosine with phosphorothioate linkage
  modified_base 16: mod_base = OTHER; note = 2'-O-methoxyethyl 5-methylcytosine with phosphorothioate linkage
  modified_base 17: mod_base = OTHER; note = 2'-O-methoxyethyl modified nucleotide with phosphorothioate linkage
  modified_base 18: mod_base = OTHER; note = 2'-O-methoxyethyl modified thymine
gaaagaagtatgaaccat

SEQ ID NO: 257-266 - skipped (10 entries)

SEQ ID NO: 267 - protein, 15 aa, synthetic construct
  SITE 2: note = 6-aminohexanoic acid
  SITE 5: note = Beta-alanine
  SITE 8: note = 6-aminohexanoic acid
  SITE 11: note = Beta-alanine
  SITE 13: note = 6-aminohexanoic acid
  SITE 14: note = Beta-alanine
  SITE 15: note = azidolysine
RXRRXRRXRRXRXXK

SEQ ID NO: 268 - protein, 23 aa, synthetic construct
  SITE 2: note = 6-aminohexanoic acid
  SITE 5: note = Beta-alanine
  SITE 8: note = 6-aminohexanoic acid
  SITE 16: note = 6-aminohexanoic acid
  SITE 18: note = Beta-alanine
  SITE 20: note = 6-aminohexanoic acid
  SITE 22: note = Beta-alanine
  SITE 23: note = azidolysine
RXRRXRRXRYQFLIRXRXRXRXK

SEQ ID NO: 269 - protein, 22 aa, synthetic construct
  SITE 1: note = Acetylated residue
  SITE 2: note = 6-aminohexanoic acid
  SITE 5: note = Beta-alanine
  SITE 8: note = 6-aminohexanoic acid
  SITE 16: note = 6-aminohexanoic acid
  SITE 18: note = Beta-alanine
  SITE 20: note = 6-aminohexanoic acid
  SITE 22: note = Beta-alanine
RXRRXRRXRYQFLIRXRXRXRX

SEQ ID NO: 270 - protein, 13 aa, synthetic construct
  SITE 1: note = Acetylated residue
  SITE 11: note = 6-aminohexanoic acid
  SITE 12: note = Beta-alanine
  SITE 13: note = azidolysine
LRKLRKRLLRXXK

SEQ ID NO: 271 - protein, 13 aa, synthetic construct
  SITE 1: note = Azidoacetyl Lysine
KLYENKPRRPYIL

SEQ ID NO: 272 - protein, 22 aa, synthetic construct
  SITE 1: note = Azidoacetyl Lysine
KPPPAGSSPGLYENKPRRPYIL

SEQ ID NO: 273 - protein, 7 aa, synthetic construct
PKKKRKV

SEQ ID NO: 274 - protein, 6 aa, synthetic construct
PKLKRQ

SEQ ID NO: 275 - protein, 4 aa, synthetic construct
RPRK

SEQ ID NO: 276 - protein, 8 aa, synthetic construct
RRARRPRG

SEQ ID NO: 277 - protein, 16 aa, synthetic construct
KRPAATKKAGQAKKKK

SEQ ID NO: 278 - protein, 9 aa, synthetic construct
PAAKRVKLD

SEQ ID NO: 279 - protein, 11 aa, synthetic construct
RQRRNELKRSP

SEQ ID NO: 280 - protein, 41 aa, synthetic construct
RMRKFKNKGKDTAELRRRRVEVSVELRKAKKDEQILKRRNV

SEQ ID NO: 281 - protein, 8 aa, synthetic construct
VSRKRPRP

SEQ ID NO: 282 - protein, 8 aa, synthetic construct
PPKKARED

SEQ ID NO: 283 - protein, 8 aa, synthetic construct
PQPKKKPL

SEQ ID NO: 284 - protein, 12 aa, synthetic construct
SALIKKKKKMAP

SEQ ID NO: 285 - protein, 5 aa, synthetic construct
DRLRR

SEQ ID NO: 286 - protein, 7 aa, synthetic construct
PKQKKRK

SEQ ID NO: 287 - protein, 10 aa, synthetic construct
RKLKKKIKKL

SEQ ID NO: 288 - protein, 10 aa, synthetic construct
REKKKFLKRR

SEQ ID NO: 289 - protein, 20 aa, synthetic construct
KRKGDEVDGVDEVAKKKSKK

SEQ ID NO: 290 - protein, 17 aa, synthetic construct
RKCLQAGMNLEARKTKK

SEQ ID NO: 291 - DNA, 21 bp, synthetic construct
  source 1..21: mol_type = other DNA
ttcggatggagagaggaagta

SEQ ID NO: 292 - DNA, 25 bp, synthetic construct
  source 1..25: mol_type = other DNA
  modified_base 1: mod_base = OTHER; note = Sarcosine attached via phosphorodiamidate to nucleotide
  modified_base 1..25: mod_base = OTHER; note = Phosphorodiamidate morpholino backbone
cctcacctgtcacatgcacagagag

SEQ ID NO: 293 - DNA, 25 bp, synthetic construct
  source 1..25: mol_type = other DNA
  modified_base 1: mod_base = OTHER; note = Sarcosine attached via phosphorodiamidate to nucleotide
  modified_base 1..25: mod_base = OTHER; note = Phosphorodiamidate morpholino backbone
cctcacctgtcacatgcacagagag

SEQ ID NO: 294 - DNA, 25 bp, synthetic construct
  source 1..25: mol_type = other DNA
cctcacctgtcacatgcacagagag

SEQ ID NO: 295 - RNA, 20 nt, synthetic construct
  source 1..20: mol_type = other RNA
  modified_base 1: mod_base = OTHER; note = 2'-O-methoxyethyl modified nucleotide with phosphorothioate linkage
  modified_base 2: mod_base = OTHER; note = 2'-O-methoxyethyl modified thymine with phosphorothioate linkage
  modified_base 3: mod_base = OTHER; note = 2'-O-methoxyethyl 5-methylcytosine
  modified_base 4: mod_base = OTHER; note = 2'-O-methoxyethyl 5-methylcytosine with phosphorothioate linkage
  modified_base 5: mod_base = OTHER; note = 2'-O-methoxyethyl modified nucleotide with phosphorothioate linkage
  modified_base 6: mod_base = OTHER; note = 2'-O-methoxyethyl modified nucleotide with phosphorothioate linkage
  modified_base 7: mod_base = OTHER; note = 2'-O-methoxyethyl modified nucleotide with phosphorothioate linkage
  modified_base 8: mod_base = OTHER; note = 2'-O-methoxyethyl modified nucleotide with phosphorothioate linkage
  modified_base 9: mod_base = OTHER; note = 2'-O-methoxyethyl modified nucleotide with phosphorothioate linkage
  modified_base 10: mod_base = OTHER; note = 2'-O-methoxyethyl modified nucleotide with phosphorothioate linkage
  modified_base 11: mod_base = OTHER; note = 2'-O-methoxyethyl modified nucleotide with phosphorothioate linkage
  modified_base 12: mod_base = OTHER; note = 2'-O-methoxyethyl modified nucleotide with phosphorothioate linkage
  modified_base 13: mod_base = OTHER; note = 2'-O-methoxyethyl modified thymine with phosphorothioate linkage
  modified_base 14: mod_base = OTHER; note = 2'-O-methoxyethyl modified nucleotide with phosphorothioate linkage
  modified_base 15: mod_base = OTHER; note = 2'-O-methoxyethyl modified thymine with phosphorothioate linkage
  modified_base 16: mod_base = OTHER; note = 2'-O-methoxyethyl modified nucleotide with phosphorothioate linkage
  modified_base 17: mod_base = OTHER; note = 2'-O-methoxyethyl modified nucleotide
  modified_base 18: mod_base = OTHER; note = 2'-O-methoxyethyl modified nucleotide with phosphorothioate linkage
  modified_base 19: mod_base = OTHER; note = 2'-O-methoxyethyl 5-methylcytosine with phosphorothioate linkage
  modified_base 20: mod_base = OTHER; note = 2'-O-methoxyethyl 5-methylcytosine
atccgaaagaagtatgaacc

SEQ ID NO: 296 - RNA, 20 nt, synthetic construct
  source 1..20: mol_type = other RNA
  modified_base 1: mod_base = OTHER; note = 2'-O-methoxyethyl modified nucleotide with phosphorothioate linkage
  modified_base 2: mod_base = OTHER; note = 2'-O-methoxyethyl modified thymine with phosphorothioate linkage
  modified_base 3: mod_base = OTHER; note = 2'-O-methoxyethyl 5-methylcytosine with phosphorothioate linkage
  modified_base 4: mod_base = OTHER; note = 2'-O-methoxyethyl 5-methylcytosine
  modified_base 5: mod_base = OTHER; note = 2'-O-methoxyethyl modified nucleotide with phosphorothioate linkage
  modified_base 6: mod_base = OTHER; note = 2'-O-methoxyethyl modified nucleotide with phosphorothioate linkage
  modified_base 7: mod_base = OTHER; note = 2'-O-methoxyethyl modified nucleotide with phosphorothioate linkage
  modified_base 8: mod_base = OTHER; note = 2'-O-methoxyethyl modified nucleotide with phosphorothioate linkage
  modified_base 9: mod_base = OTHER; note = 2'-O-methoxyethyl modified nucleotide with phosphorothioate linkage
  modified_base 10: mod_base = OTHER; note = 2'-O-methoxyethyl modified nucleotide with phosphorothioate linkage
  modified_base 11: mod_base = OTHER; note = 2'-O-methoxyethyl modified nucleotide with phosphorothioate linkage
  modified_base 12: mod_base = OTHER; note = 2'-O-methoxyethyl modified nucleotide with phosphorothioate linkage
  modified_base 13: mod_base = OTHER; note = 2'-O-methoxyethyl modified thymine with phosphorothioate linkage
  modified_base 14: mod_base = OTHER; note = 2'-O-methoxyethyl modified nucleotide with phosphorothioate linkage
  modified_base 15: mod_base = OTHER; note = 2'-O-methoxyethyl modified thymine with phosphorothioate linkage
  modified_base 16: mod_base = OTHER; note = 2'-O-methoxyethyl modified nucleotide
  modified_base 17: mod_base = OTHER; note = 2'-O-methoxyethyl modified nucleotide with phosphorothioate linkage
  modified_base 18: mod_base = OTHER; note = 2'-O-methoxyethyl modified nucleotide with phosphorothioate linkage
  modified_base 19: mod_base = OTHER; note = 2'-O-methoxyethyl 5-methylcytosine with phosphorothioate linkage
  modified_base 20: mod_base = OTHER; note = 2'-O-methoxyethyl 5-methylcytosine
atccgaaagaagtatgaacc

SEQ ID NO: 297 - RNA, 20 nt, synthetic construct
  source 1..20: mol_type = other RNA
  modified_base 1: mod_base = OTHER; note = 2'-O-methoxyethyl modified nucleotide with phosphorothioate linkage
  modified_base 2: mod_base = OTHER; note = 2'-O-methoxyethyl modified thymine with phosphorothioate linkage
  modified_base 3: mod_base = OTHER; note = 2'-O-methoxyethyl 5-methylcytosine with phosphorothioate linkage
  modified_base 4: mod_base = OTHER; note = 2'-O-methoxyethyl 5-methylcytosine with phosphorothioate linkage
  modified_base 5: mod_base = OTHER; note = 2'-O-methoxyethyl modified nucleotide
  modified_base 6: mod_base = OTHER; note = 2'-O-methoxyethyl modified nucleotide with phosphorothioate linkage
  modified_base 7: mod_base = OTHER; note = 2'-O-methoxyethyl modified nucleotide with phosphorothioate linkage
  modified_base 8: mod_base = OTHER; note = 2'-O-methoxyethyl modified nucleotide with phosphorothioate linkage
  modified_base 9: mod_base = OTHER; note = 2'-O-methoxyethyl modified nucleotide with phosphorothioate linkage
  modified_base 10: mod_base = OTHER; note = 2'-O-methoxyethyl modified nucleotide with phosphorothioate linkage
  modified_base 11: mod_base = OTHER; note = 2'-O-methoxyethyl modified nucleotide with phosphorothioate linkage
  modified_base 12: mod_base = OTHER; note = 2'-O-methoxyethyl modified nucleotide with phosphorothioate linkage
  modified_base 13: mod_base = OTHER; note = 2'-O-methoxyethyl modified thymine with phosphorothioate linkage
  modified_base 14: mod_base = OTHER; note = 2'-O-methoxyethyl modified nucleotide with phosphorothioate linkage
  modified_base 15: mod_base = OTHER; note = 2'-O-methoxyethyl modified thymine
  modified_base 16: mod_base = OTHER; note = 2'-O-methoxyethyl modified nucleotide with phosphorothioate linkage
  modified_base 17: mod_base = OTHER; note = 2'-O-methoxyethyl modified nucleotide with phosphorothioate linkage
  modified_base 18: mod_base = OTHER; note = 2'-O-methoxyethyl modified nucleotide with phosphorothioate linkage
  modified_base 19: mod_base = OTHER; note = 2'-O-methoxyethyl 5-methylcytosine with phosphorothioate linkage
  modified_base 20: mod_base = OTHER; note = 2'-O-methoxyethyl 5-methylcytosine
atccgaaagaagtatgaacc

SEQ ID NO: 298 - RNA, 20 nt, synthetic construct
  source 1..20: mol_type = other RNA
  modified_base 1: mod_base = OTHER; note = 2'-O-methoxyethyl modified nucleotide with phosphorothioate linkage
  modified_base 2: mod_base = OTHER; note = 2'-O-methoxyethyl modified thymine with phosphorothioate linkage
  modified_base 3: mod_base = OTHER; note = 2'-O-methoxyethyl 5-methylcytosine with phosphorothioate linkage
  modified_base 4: mod_base = OTHER; note = 2'-O-methoxyethyl 5-methylcytosine with phosphorothioate linkage
  modified_base 5: mod_base = OTHER; note = 2'-O-methoxyethyl modified nucleotide
  modified_base 6: mod_base = OTHER; note = 2'-O-methoxyethyl modified nucleotide with phosphorothioate linkage
  modified_base 7: mod_base = OTHER; note = 2'-O-methoxyethyl modified nucleotide with phosphorothioate linkage
  modified_base 8: mod_base = OTHER; note = 2'-O-methoxyethyl modified nucleotide with phosphorothioate linkage
  modified_base 9: mod_base = OTHER; note = 2'-O-methoxyethyl modified nucleotide with phosphorothioate linkage
  modified_base 10: mod_base = OTHER; note = 2'-O-methoxyethyl modified nucleotide with phosphorothioate linkage
  modified_base 11: mod_base = OTHER; note = 2'-O-methoxyethyl modified nucleotide with phosphorothioate linkage
  modified_base 12: mod_base = OTHER; note = 2'-O-methoxyethyl modified nucleotide with phosphorothioate linkage
  modified_base 13: mod_base = OTHER; note = 2'-O-methoxyethyl modified thymine with phosphorothioate linkage
  modified_base 14: mod_base = OTHER; note = 2'-O-methoxyethyl modified nucleotide
  modified_base 15: mod_base = OTHER; note = 2'-O-methoxyethyl modified thymine with phosphorothioate linkage
  modified_base 16: mod_base = OTHER; note = 2'-O-methoxyethyl modified nucleotide with phosphorothioate linkage
  modified_base 17: mod_base = OTHER; note = 2'-O-methoxyethyl modified nucleotide with phosphorothioate linkage
  modified_base 18: mod_base = OTHER; note = 2'-O-methoxyethyl modified nucleotide with phosphorothioate linkage
  modified_base 19: mod_base = OTHER; note = 2'-O-methoxyethyl 5-methylcytosine with phosphorothioate linkage
  modified_base 20: mod_base = OTHER; note = 2'-O-methoxyethyl 5-methylcytosine
atccgaaagaagtatgaacc

SEQ ID NO: 299 - RNA, 20 nt, synthetic construct
  source 1..20: mol_type = other RNA
  modified_base 1: mod_base = OTHER; note = 2'-O-methoxyethyl modified nucleotide with phosphorothioate linkage
  modified_base 2: mod_base = OTHER; note = 2'-O-methoxyethyl modified thymine with phosphorothioate linkage
  modified_base 3: mod_base = OTHER; note = 2'-O-methoxyethyl 5-methylcytosine with phosphorothioate linkage
  modified_base 4: mod_base = OTHER; note = 2'-O-methoxyethyl 5-methylcytosine
  modified_base 5: mod_base = OTHER; note = 2'-O-methoxyethyl modified nucleotide with phosphorothioate linkage
  modified_base 6: mod_base = OTHER; note = 2'-O-methoxyethyl modified nucleotide with phosphorothioate linkage
  modified_base 7: mod_base = OTHER; note = 2'-O-methoxyethyl modified nucleotide with phosphorothioate linkage
  modified_base 8: mod_base = OTHER; note = 2'-O-methoxyethyl modified nucleotide with phosphorothioate linkage
  modified_base 9: mod_base = OTHER; note = 2'-O-methoxyethyl modified nucleotide with phosphorothioate linkage
  modified_base 10: mod_base = OTHER; note = 2'-O-methoxyethyl modified nucleotide
  modified_base 11: mod_base = OTHER; note = 2'-O-methoxyethyl modified nucleotide with phosphorothioate linkage
  modified_base 12: mod_base = OTHER; note = 2'-O-methoxyethyl modified nucleotide with phosphorothioate linkage
  modified_base 13: mod_base = OTHER; note = 2'-O-methoxyethyl modified thymine with phosphorothioate linkage
  modified_base 14: mod_base = OTHER; note = 2'-O-methoxyethyl modified nucleotide with phosphorothioate linkage
  modified_base 15: mod_base = OTHER; note = 2'-O-methoxyethyl modified thymine with phosphorothioate linkage
  modified_base 16: mod_base = OTHER; note = 2'-O-methoxyethyl modified nucleotide
  modified_base 17: mod_base = OTHER; note = 2'-O-methoxyethyl modified nucleotide with phosphorothioate linkage
  modified_base 18: mod_base = OTHER; note = 2'-O-methoxyethyl modified nucleotide with phosphorothioate linkage
  modified_base 19: mod_base = OTHER; note = 2'-O-methoxyethyl 5-methylcytosine with phosphorothioate linkage
  modified_base 20: mod_base = OTHER; note = 2'-O-methoxyethyl 5-methylcytosine
atccgaaagaagtatgaacc

SEQ ID NO: 300 - RNA, 20 nt, synthetic construct
  source 1..20: mol_type = other RNA
  modified_base 1: mod_base = OTHER; note = 2'-O-methoxyethyl modified nucleotide with phosphorothioate linkage
  modified_base 2: mod_base = OTHER; note = 2'-O-methoxyethyl modified thymine with phosphorothioate linkage
  modified_base 3: mod_base = OTHER; note = 2'-O-methoxyethyl 5-methylcytosine with phosphorothioate linkage
  modified_base 4: mod_base = OTHER; note = 2'-O-methoxyethyl 5-methylcytosine
  modified_base 5: mod_base = OTHER; note = locked nucleic acid with phosphorothioate linkage
  modified_base 6: mod_base = OTHER; note = 2'-O-methoxyethyl modified nucleotide with phosphorothioate linkage
  modified_base 7: mod_base = OTHER; note = 2'-O-methoxyethyl modified nucleotide with phosphorothioate linkage
  modified_base 8: mod_base = OTHER; note = 2'-O-methoxyethyl modified nucleotide with phosphorothioate linkage
  modified_base 9: mod_base = OTHER; note = 2'-O-methoxyethyl modified nucleotide with phosphorothioate linkage
  modified_base 10: mod_base = OTHER; note = 2'-O-methoxyethyl modified nucleotide with phosphorothioate linkage
  modified_base 11: mod_base = OTHER; note = 2'-O-methoxyethyl modified nucleotide with phosphorothioate linkage
  modified_base 12: mod_base = OTHER; note = 2'-O-methoxyethyl modified nucleotide with phosphorothioate linkage
  modified_base 13: mod_base = OTHER; note = 2'-O-methoxyethyl modified thymine with phosphorothioate linkage
  modified_base 14: mod_base = OTHER; note = 2'-O-methoxyethyl modified nucleotide with phosphorothioate linkage
  modified_base 15: mod_base = OTHER; note = 2'-O-methoxyethyl modified thymine with phosphorothioate linkage
  modified_base 16: mod_base = OTHER; note = 2'-O-methoxyethyl modified nucleotide with phosphorothioate linkage
  modified_base 17: mod_base = OTHER; note = 2'-O-methoxyethyl modified nucleotide with phosphorothioate linkage
  modified_base 18: mod_base = OTHER; note = 2'-O-methoxyethyl modified nucleotide with phosphorothioate linkage
  modified_base 19: mod_base = OTHER; note = 2'-O-methoxyethyl 5-methylcytosine with phosphorothioate linkage
  modified_base 20: mod_base = OTHER; note = 2'-O-methoxyethyl 5-methylcytosine
atccgaaagaagtatgaacc

SEQ ID NO: 301 - RNA, 20 nt, synthetic construct
  source 1..20: mol_type = other RNA
  modified_base 1: mod_base = OTHER; note = 2'-O-methoxyethyl modified nucleotide with phosphorothioate linkage
  modified_base 2: mod_base = OTHER; note = 2'-O-methoxyethyl modified thymine with phosphorothioate linkage
  modified_base 3: mod_base = OTHER; note = 2'-O-methoxyethyl 5-methylcytosine with phosphorothioate linkage
  modified_base 4: mod_base = OTHER; note = 2'-O-methoxyethyl 5-methylcytosine
  modified_base 5: mod_base = OTHER; note = locked nucleic acid with phosphorothioate linkage
  modified_base 6: mod_base = OTHER; note = 2'-O-methoxyethyl modified nucleotide with phosphorothioate linkage
  modified_base 7: mod_base = OTHER; note = 2'-O-methoxyethyl modified nucleotide with phosphorothioate linkage
  modified_base 8: mod_base = OTHER; note = 2'-O-methoxyethyl modified nucleotide with phosphorothioate linkage
  modified_base 9: mod_base = OTHER; note = 2'-O-methoxyethyl modified nucleotide with phosphorothioate linkage
  modified_base 10: mod_base = OTHER; note = 2'-O-methoxyethyl modified nucleotide with phosphorothioate linkage
  modified_base 11: mod_base = OTHER; note = 2'-O-methoxyethyl modified nucleotide with phosphorothioate linkage
  modified_base 12: mod_base = OTHER; note = 2'-O-methoxyethyl modified nucleotide with phosphorothioate linkage
  modified_base 13: mod_base = OTHER; note = 2'-O-methoxyethyl modified thymine with phosphorothioate linkage
  modified_base 14: mod_base = OTHER; note = 2'-O-methoxyethyl modified nucleotide with phosphorothioate linkage
  modified_base 15: mod_base = OTHER; note = 2'-O-methoxyethyl modified thymine with phosphorothioate linkage
  modified_base 16: mod_base = OTHER; note = 2'-O-methoxyethyl modified nucleotide
  modified_base 17: mod_base = OTHER; note = locked nucleic acid with phosphorothioate linkage
  modified_base 18: mod_base = OTHER; note = 2'-O-methoxyethyl modified nucleotide with phosphorothioate linkage
  modified_base 19: mod_base = OTHER; note = 2'-O-methoxyethyl 5-methylcytosine with phosphorothioate linkage
  modified_base 20: mod_base = OTHER; note = 2'-O-methoxyethyl 5-methylcytosine
atccgaaagaagtatgaacc

SEQ ID NO: 302 - RNA, 20 nt, synthetic construct
  source 1..20: mol_type = other RNA
  modified_base 1: mod_base = OTHER; note = 2'-O-methoxyethyl modified nucleotide with phosphorothioate linkage
  modified_base 2: mod_base = OTHER; note = 2'-O-methoxyethyl modified thymine with phosphorothioate linkage
  modified_base 3: mod_base = OTHER; note = 2'-O-methoxyethyl 5-methylcytosine with phosphorothioate linkage
  modified_base 4: mod_base = OTHER; note = 2'-O-methoxyethyl 5-methylcytosine
  modified_base 5: mod_base = OTHER; note = locked nucleic acid with phosphorothioate linkage
  modified_base 6: mod_base = OTHER; note = 2'-O-methoxyethyl modified nucleotide with phosphorothioate linkage
  modified_base 7: mod_base = OTHER; note = 2'-O-methoxyethyl modified nucleotide with phosphorothioate linkage
  modified_base 8: mod_base = OTHER; note = 2'-O-methoxyethyl modified nucleotide with phosphorothioate linkage
  modified_base 9: mod_base = OTHER; note = 2'-O-methoxyethyl modified nucleotide with phosphorothioate linkage
  modified_base 10: mod_base = OTHER; note = 2'-O-methoxyethyl modified nucleotide with phosphorothioate linkage
  modified_base 11: mod_base = OTHER; note = locked nucleic acid with phosphorothioate linkage
  modified_base 12: mod_base = OTHER; note = 2'-O-methoxyethyl modified nucleotide with phosphorothioate linkage
  modified_base 13: mod_base = OTHER; note = 2'-O-methoxyethyl modified thymine with phosphorothioate linkage
  modified_base 14: mod_base = OTHER; note = 2'-O-methoxyethyl modified nucleotide with phosphorothioate linkage
  modified_base 15: mod_base = OTHER; note = 2'-O-methoxyethyl modified thymine with phosphorothioate linkage
  modified_base 16: mod_base = OTHER; note = 2'-O-methoxyethyl modified nucleotide
  modified_base 17: mod_base = OTHER; note = locked nucleic acid with phosphorothioate linkage
  modified_base 18: mod_base = OTHER; note = 2'-O-methoxyethyl modified nucleotide with phosphorothioate linkage
  modified_base 19: mod_base = OTHER; note = 2'-O-methoxyethyl 5-methylcytosine with phosphorothioate linkage
  modified_base 20: mod_base = OTHER; note = 2'-O-methoxyethyl 5-methylcytosine
atccgaaagaagtatgaacc

SEQ ID NO: 303 - RNA, 20 nt, synthetic construct
  source 1..20: mol_type = other RNA
  modified_base 1: mod_base = OTHER; note = 2'-O-methyl modified nucleotide with phosphorothioate linkage
  modified_base 2: mod_base = OTHER; note = 2'-O-methyl modified thymine with phosphorothioate linkage
  modified_base 3: mod_base = OTHER; note = 2'-fluoro 5-methylcytosine with phosphorothioate linkage
  modified_base 4: mod_base = OTHER; note = 2'-fluoro 5-methylcytosine with phosphorothioate linkage
  modified_base 5: mod_base = OTHER; note = 2'-fluoro modified nucleotide with phosphorothioate linkage
  modified_base 6: mod_base = OTHER; note = 2'-fluoro modified nucleotide with phosphorothioate linkage
  modified_base 7: mod_base = OTHER; note = 2'-fluoro modified nucleotide with phosphorothioate linkage
  modified_base 8: mod_base = OTHER; note = 2'-fluoro modified nucleotide with phosphorothioate linkage
  modified_base 9: mod_base = OTHER; note = 2'-fluoro modified nucleotide with phosphorothioate linkage
  modified_base 10: mod_base = OTHER; note = 2'-fluoro modified nucleotide with phosphorothioate linkage
  modified_base 11: mod_base = OTHER; note = 2'-fluoro modified nucleotide with phosphorothioate linkage
  modified_base 12: mod_base = OTHER; note = 2'-fluoro modified nucleotide with phosphorothioate linkage
  modified_base 13: mod_base = OTHER; note = 2'-fluoro modified thymine with phosphorothioate linkage
  modified_base 14: mod_base = OTHER; note = 2'-fluoro modified nucleotide with phosphorothioate linkage
  modified_base 15: mod_base = OTHER; note = 2'-fluoro modified thymine with phosphorothioate linkage
  modified_base 16: mod_base = OTHER; note = 2'-fluoro modified nucleotide with phosphorothioate linkage
  modified_base 17: mod_base = OTHER; note = 2'-fluoro modified nucleotide with phosphorothioate linkage
  modified_base 18: mod_base = OTHER; note = 2'-fluoro modified nucleotide with phosphorothioate linkage
  modified_base 19: mod_base = OTHER; note = 2'-O-methyl 5-methylcytosine with phosphorothioate linkage
  modified_base 20: mod_base = OTHER; note = 2'-O-methyl 5-methylcytosine
atccgaaagaagtatgaacc

SEQ ID NO: 304 - RNA, 20 nt, synthetic construct
  source 1..20: mol_type = other RNA
  modified_base 1: mod_base = OTHER; note = 2'-fluoro modified nucleotide with phosphorothioate linkage
  modified_base 2: mod_base = OTHER; note = 2'-fluoro modified thymine with phosphorothioate linkage
  modified_base 3: mod_base = OTHER; note = 2'-fluoro 5-methylcytosine with phosphorothioate linkage
  modified_base 4: mod_base = OTHER; note = 2'-fluoro 5-methylcytosine with phosphorothioate linkage
  modified_base 5: mod_base = OTHER; note = 2'-fluoro modified nucleotide with phosphorothioate linkage
  modified_base 6: mod_base = OTHER; note = 2'-O-methyl modified nucleotide with phosphorothioate linkage
  modified_base 7: mod_base = OTHER; note = 2'-O-methyl modified nucleotide with phosphorothioate linkage
  modified_base 8: mod_base = OTHER; note = 2'-O-methyl modified nucleotide with phosphorothioate linkage
  modified_base 9: mod_base = OTHER; note = 2'-O-methyl modified nucleotide with phosphorothioate linkage
  modified_base 10: mod_base = OTHER; note = 2'-O-methyl modified nucleotide with phosphorothioate linkage
  modified_base 11: mod_base = OTHER; note = 2'-O-methyl modified nucleotide with phosphorothioate linkage
  modified_base 12: mod_base = OTHER; note = 2'-O-methyl modified nucleotide with phosphorothioate linkage
  modified_base 13: mod_base = OTHER; note = 2'-O-methyl modified thymine with phosphorothioate linkage
  modified_base 14: mod_base = OTHER; note = 2'-O-methyl modified nucleotide with phosphorothioate linkage
  modified_base 15: mod_base = OTHER; note = 2'-fluoro modified thymine with phosphorothioate linkage
  modified_base 16: mod_base = OTHER; note = 2'-fluoro modified nucleotide with phosphorothioate linkage
  modified_base 17: mod_base = OTHER; note = 2'-fluoro modified nucleotide with phosphorothioate linkage
  modified_base 18: mod_base = OTHER; note = 2'-fluoro modified nucleotide with phosphorothioate linkage
  modified_base 19: mod_base = OTHER; note = 2'-fluoro 5-methylcytosine with phosphorothioate linkage
  modified_base 20: mod_base = OTHER; note = 2'-fluoro 5-methylcytosine
atccgaaagaagtatgaacc

SEQ ID NO: 305 - RNA, 20 nt, synthetic construct
  source 1..20: mol_type = other RNA
  modified_base 1: mod_base = OTHER; note = 2'-O-methoxyethyl modified nucleotide with phosphorothioate linkage
  modified_base 2: mod_base = OTHER; note = 2'-O-methoxyethyl modified thymine with phosphorothioate linkage
  modified_base 3: mod_base = OTHER; note = 2'-O-methoxyethyl 5-methylcytosine with phosphorothioate linkage
  modified_base 4: mod_base = OTHER; note = 2'-O-methoxyethyl 5-methylcytosine with phosphorothioate linkage
  modified_base 5: mod_base = OTHER; note = 2'-O-methoxyethyl modified nucleotide with phosphorothioate linkage
  modified_base 6: mod_base = OTHER; note = 2'-O-methoxyethyl modified nucleotide with phosphorothioate linkage
  modified_base 7: mod_base = OTHER; note = 2'-O-methoxyethyl modified nucleotide with phosphorothioate linkage
  modified_base 8: mod_base = OTHER; note = 2'-O-methoxyethyl modified nucleotide with phosphorothioate linkage
  modified_base 9: mod_base = OTHER; note = 2'-O-methoxyethyl modified nucleotide with phosphorothioate linkage
  modified_base 10: mod_base = OTHER; note = 2'-O-methoxyethyl modified nucleotide with phosphorothioate linkage
  modified_base 11: mod_base = OTHER; note = 2'-O-methoxyethyl modified nucleotide with phosphorothioate linkage
  modified_base 12: mod_base = OTHER; note = 2'-O-methoxyethyl modified nucleotide with phosphorothioate linkage
  modified_base 13: mod_base = OTHER; note = 2'-O-methoxyethyl modified thymine with phosphorothioate linkage
  modified_base 14: mod_base = OTHER; note = 2'-O-methoxyethyl modified nucleotide with phosphorothioate linkage
  modified_base 15: mod_base = OTHER; note = 2'-O-methoxyethyl modified thymine with phosphorothioate linkage
  modified_base 16: mod_base = OTHER; note = 2'-O-methoxyethyl modified nucleotide with phosphorothioate linkage
  modified_base 17: mod_base = OTHER; note = 2'-O-methoxyethyl modified nucleotide with phosphorothioate linkage
  modified_base 18: mod_base = OTHER; note = 2'-O-methoxyethyl modified nucleotide with phosphorothioate linkage
  modified_base 19: mod_base = OTHER; note = 2'-O-methoxyethyl 5-methylcytosine with phosphorothioate linkage
  modified_base 20: mod_base = OTHER; note = 2'-O-methoxyethyl 5-methylcytosine
atccgaaagaagtatgaacc

SEQ ID NO: 306 - RNA, 20 nt, synthetic construct
  source 1..20: mol_type = other RNA
  modified_base 1: mod_base = OTHER; note = 2'-O-methoxyethyl modified nucleotide with phosphorothioate linkage
  modified_base 2: mod_base = OTHER; note = 2'-O-methoxyethyl modified thymine with phosphorothioate linkage
  modified_base 3: mod_base = OTHER; note = 2'-O-methoxyethyl 5-methylcytosine with phosphorothioate linkage
  modified_base 4: mod_base = OTHER; note = 2'-O-methoxyethyl 5-methylcytosine with phosphorothioate linkage
  modified_base 5: mod_base = OTHER; note = 2'-O-methoxyethyl modified nucleotide with phosphorothioate linkage
  modified_base 6: mod_base = OTHER; note = 2'-O-methoxyethyl modified nucleotide with phosphorothioate linkage
  modified_base 7: mod_base = OTHER; note = 2'-O-methoxyethyl modified nucleotide with phosphorothioate linkage
  modified_base 8: mod_base = OTHER; note = 2'-O-methoxyethyl modified nucleotide with phosphorothioate linkage
  modified_base 9: mod_base = OTHER; note = 2'-O-methoxyethyl modified nucleotide with phosphorothioate linkage
  modified_base 10: mod_base = OTHER; note = 2'-O-methoxyethyl modified nucleotide with phosphorothioate linkage
  modified_base 11: mod_base = OTHER; note = 2'-O-methoxyethyl modified nucleotide with phosphorothioate linkage
  modified_base 12: mod_base = OTHER; note = 2'-O-methoxyethyl modified nucleotide with phosphorothioate linkage
  modified_base 13: mod_base = OTHER; note = 2'-O-methoxyethyl modified thymine with phosphorothioate linkage
  modified_base 14: mod_base = OTHER; note = 2'-O-methoxyethyl modified nucleotide with phosphorothioate linkage
  modified_base 15: mod_base = OTHER; note = 2'-O-methoxyethyl modified thymine with phosphorothioate linkage
  modified_base 16: mod_base = OTHER; note = 2'-O-methoxyethyl modified nucleotide with phosphorothioate linkage
  modified_base 17: mod_base = OTHER; note = 2'-O-methoxyethyl modified nucleotide with phosphorothioate linkage
  modified_base 18: mod_base = OTHER; note = 2'-O-methoxyethyl modified nucleotide with phosphorothioate linkage
  modified_base 19: mod_base = OTHER; note = 2'-O-methoxyethyl 5-methylcytosine with phosphorothioate linkage
  modified_base 20: mod_base = OTHER; note = 2'-O-methoxyethyl 5-methylcytosine
atccgaaagaagtatgaacc

SEQ ID NO: 307 - RNA, 20 nt, synthetic construct
  source 1..20: mol_type = other RNA
  modified_base 1: mod_base = OTHER; note = 2'-O-methoxyethyl modified nucleotide with phosphorothioate linkage
  modified_base 2: mod_base = OTHER; note = 2'-O-methoxyethyl modified thymine with phosphorothioate linkage
  modified_base 3: mod_base = OTHER; note = 2'-O-methoxyethyl 5-methylcytosine with phosphorothioate linkage
  modified_base 4: mod_base = OTHER; note = 2'-O-methoxyethyl 5-methylcytosine with phosphorothioate linkage
  modified_base 5: mod_base = OTHER; note = 2'-O-methoxyethyl modified nucleotide with phosphorothioate linkage
  modified_base 6: mod_base = OTHER; note = 2'-O-methoxyethyl modified nucleotide with phosphorothioate linkage
  modified_base 7: mod_base = OTHER; note = 2'-O-methoxyethyl modified nucleotide with phosphorothioate linkage
  modified_base 8: mod_base = OTHER; note = 2'-O-methoxyethyl modified nucleotide with phosphorothioate linkage
  modified_base 9: mod_base = OTHER; note = 2'-O-methoxyethyl modified nucleotide with phosphorothioate linkage
  modified_base 10: mod_base = OTHER; note = 2'-O-methoxyethyl modified nucleotide with phosphorothioate linkage
  modified_base 11: mod_base = OTHER; note = 2'-O-methoxyethyl modified nucleotide with phosphorothioate linkage
  modified_base 12: mod_base = OTHER; note = 2'-O-methoxyethyl modified nucleotide with phosphorothioate linkage
  modified_base 13: mod_base = OTHER; note = 2'-O-methoxyethyl modified thymine with phosphorothioate linkage
  modified_base 14: mod_base = OTHER; note = 2'-O-methoxyethyl modified nucleotide with phosphorothioate linkage
  modified_base 15: mod_base = OTHER; note = 2'-O-methoxyethyl modified thymine with phosphorothioate linkage
  modified_base 16: mod_base = OTHER; note = 2'-O-methoxyethyl modified nucleotide with phosphorothioate linkage
  modified_base 17: mod_base = OTHER; note = 2'-O-methoxyethyl modified nucleotide with phosphorothioate linkage
  modified_base 18: mod_base = OTHER; note = 2'-O-methoxyethyl modified nucleotide with phosphorothioate linkage
  modified_base 19: mod_base = OTHER; note = 2'-O-methoxyethyl 5-methylcytosine with phosphorothioate linkage
  modified_base 20: mod_base = OTHER; note = 2'-O-methoxyethyl 5-methylcytosine
atccgaaagaagtatgaacc

SEQ ID NO: 308 - RNA, 20 nt, synthetic construct
  source 1..20: mol_type = other RNA
  modified_base 1: mod_base = OTHER; note = 2'-O-methoxyethyl modified nucleotide with phosphorothioate linkage
  modified_base 2: mod_base = OTHER; note = 2'-O-methoxyethyl modified thymine with phosphorothioate linkage
  modified_base 3: mod_base = OTHER; note = 2'-O-methoxyethyl 5-methylcytosine with phosphorothioate linkage
  modified_base 4: mod_base = OTHER; note = 2'-O-methoxyethyl 5-methylcytosine with phosphorothioate linkage
  modified_base 5: mod_base = OTHER; note = 2'-O-methoxyethyl modified nucleotide with phosphorothioate linkage
  modified_base 6: mod_base = OTHER; note = 2'-O-methoxyethyl modified nucleotide with phosphorothioate linkage
  modified_base 7: mod_base = OTHER; note = 2'-O-methoxyethyl modified nucleotide with phosphorothioate linkage
  modified_base 8: mod_base = OTHER; note = 2'-O-methoxyethyl modified nucleotide with phosphorothioate linkage
  modified_base 9: mod_base = OTHER; note = 2'-O-methoxyethyl modified nucleotide with phosphorothioate linkage
  modified_base 10: mod_base = OTHER; note = 2'-O-methoxyethyl modified nucleotide with phosphorothioate linkage
  modified_base 11: mod_base = OTHER; note = 2'-O-methoxyethyl modified nucleotide with phosphorothioate linkage
  modified_base 12: mod_base = OTHER; note = 2'-O-methoxyethyl modified nucleotide with phosphorothioate linkage
  modified_base 13: mod_base = OTHER; note = 2'-O-methoxyethyl modified thymine with phosphorothioate linkage
  modified_base 14: mod_base = OTHER; note = 2'-O-methoxyethyl modified nucleotide with phosphorothioate linkage
  modified_base 15: mod_base = OTHER; note = 2'-O-methoxyethyl modified thymine with phosphorothioate linkage
  modified_base 16: mod_base = OTHER; note = 2'-O-methoxyethyl modified nucleotide with phosphorothioate linkage
  modified_base 17: mod_base = OTHER; note = 2'-O-methoxyethyl modified nucleotide with phosphorothioate linkage
  modified_base 18: mod_base = OTHER; note = 2'-O-methoxyethyl modified nucleotide with phosphorothioate linkage
  modified_base 19: mod_base = OTHER; note = 2'-O-methoxyethyl 5-methylcytosine with phosphorothioate linkage
  modified_base 20: mod_base = OTHER; note = 2'-O-methoxyethyl 5-methylcytosine
atccgaaagaagtatgaacc

SEQ ID NO: 309 - RNA, 20 nt, synthetic construct
  source 1..20: mol_type = other RNA
  modified_base 1: mod_base = OTHER; note = 2'-O-methoxyethyl modified nucleotide with phosphorothioate linkage
  modified_base 2: mod_base = OTHER; note = 2'-O-methoxyethyl modified thymine with phosphorothioate linkage
  modified_base 3: mod_base = OTHER; note = 2'-O-methoxyethyl 5-methylcytosine with phosphorothioate linkage
  modified_base 4: mod_base = OTHER; note = 2'-O-methoxyethyl 5-methylcytosine with phosphorothioate linkage
  modified_base 5: mod_base = OTHER; note = 2'-O-methoxyethyl modified nucleotide with phosphorothioate linkage
  modified_base 6: mod_base = OTHER; note = 2'-O-methoxyethyl modified nucleotide with phosphorothioate linkage
  modified_base 7: mod_base = OTHER; note = 2'-O-methoxyethyl modified nucleotide with phosphorothioate linkage
  modified_base 8: mod_base = OTHER; note = 2'-O-methoxyethyl modified nucleotide with phosphorothioate linkage
  modified_base 9: mod_base = OTHER; note = 2'-O-methoxyethyl modified nucleotide with phosphorothioate linkage
  modified_base 10: mod_base = OTHER; note = 2'-O-methoxyethyl modified nucleotide with phosphorothioate linkage
  modified_base 11: mod_base = OTHER; note = 2'-O-methoxyethyl modified nucleotide with phosphorothioate linkage
  modified_base 12: mod_base = OTHER; note = 2'-O-methoxyethyl modified nucleotide with phosphorothioate linkage
  modified_base 13: mod_base = OTHER; note = 2'-O-methoxyethyl modified thymine with phosphorothioate linkage
  modified_base 14: mod_base = OTHER; note = 2'-O-methoxyethyl modified nucleotide with phosphorothioate linkage
  modified_base 15: mod_base = OTHER; note = 2'-O-methoxyethyl modified thymine with phosphorothioate linkage
  modified_base 16: mod_base = OTHER; note = 2'-O-methoxyethyl modified nucleotide with phosphorothioate linkage
  modified_base 17: mod_base = OTHER; note = 2'-O-methoxyethyl modified nucleotide with phosphorothioate linkage
  modified_base 18: mod_base = OTHER; note = 2'-O-methoxyethyl modified nucleotide with phosphorothioate linkage
  modified_base 19: mod_base = OTHER; note = 2'-O-methoxyethyl 5-methylcytosine with phosphorothioate linkage
  modified_base 20: mod_base = OTHER; note = 2'-O-methoxyethyl 5-methylcytosine
atccgaaagaagtatgaacc

SEQ ID NO: 310 - RNA, 20 nt, synthetic construct
  source 1..20: mol_type = other RNA
  modified_base 1: mod_base = OTHER; note = 2'-O-methoxyethyl modified nucleotide with phosphorothioate linkage
  modified_base 2: mod_base = OTHER; note = 2'-O-methoxyethyl modified thymine with phosphorothioate linkage
  modified_base 3: mod_base = OTHER; note = 2'-O-methoxyethyl 5-methylcytosine with phosphorothioate linkage
  modified_base 4: mod_base = OTHER; note = 2'-O-methoxyethyl 5-methylcytosine with phosphorothioate linkage
  modified_base 5: mod_base = OTHER; note = 2'-O-methoxyethyl modified nucleotide with phosphorothioate linkage
  modified_base 6: mod_base = OTHER; note = 2'-O-methoxyethyl modified nucleotide with phosphorothioate linkage
  modified_base 7: mod_base = OTHER; note = 2'-O-methoxyethyl modified nucleotide with phosphorothioate linkage
  modified_base 8: mod_base = OTHER; note = 2'-O-methoxyethyl modified nucleotide with phosphorothioate linkage
  modified_base 9: mod_base = OTHER; note = 2'-O-methoxyethyl modified nucleotide with phosphorothioate linkage
  modified_base 10: mod_base = OTHER; note = 2'-O-methoxyethyl modified nucleotide with phosphorothioate linkage
  modified_base 11: mod_base = OTHER; note = 2'-O-methoxyethyl modified nucleotide with phosphorothioate linkage
  modified_base 12: mod_base = OTHER; note = 2'-O-methoxyethyl modified nucleotide with phosphorothioate linkage
  modified_base 13: mod_base = OTHER; note = 2'-O-methoxyethyl modified thymine with phosphorothioate linkage
  modified_base 14: mod_base = OTHER; note = 2'-O-methoxyethyl modified nucleotide with phosphorothioate linkage
  modified_base 15: mod_base = OTHER; note = 2'-O-methoxyethyl modified thymine with phosphorothioate linkage
  modified_base 16: mod_base = OTHER; note = 2'-O-methoxyethyl modified nucleotide with phosphorothioate linkage
  modified_base 17: mod_base = OTHER; note = 2'-O-methoxyethyl modified nucleotide with phosphorothioate linkage
  modified_base 18: mod_base = OTHER; note = 2'-O-methoxyethyl modified nucleotide with phosphorothioate linkage
  modified_base 19: mod_base = OTHER; note = 2'-O-methoxyethyl 5-methylcytosine with phosphorothioate linkage
  modified_base 20: mod_base = OTHER; note = 2'-O-methoxyethyl 5-methylcytosine
atccgaaagaagtatgaacc

SEQ ID NO: 311 - RNA, 20 nt, synthetic construct
  source 1..20: mol_type = other RNA
  modified_base 1: mod_base = OTHER; note = 2'-O-methoxyethyl modified nucleotide with phosphorothioate linkage
  modified_base 2: mod_base = OTHER; note = 2'-O-methoxyethyl modified thymine with phosphorothioate linkage
  modified_base 3: mod_base = OTHER; note = 2'-O-methoxyethyl 5-methylcytosine with phosphorothioate linkage
  modified_base 4: mod_base = OTHER; note = 2'-O-methoxyethyl 5-methylcytosine with phosphorothioate linkage
  modified_base 5: mod_base = OTHER; note = 2'-O-methoxyethyl modified nucleotide with phosphorothioate linkage
  modified_base 6: mod_base = OTHER; note = 2'-O-methoxyethyl modified nucleotide with phosphorothioate linkage
  modified_base 7: mod_base = OTHER; note = 2'-O-methoxyethyl modified nucleotide with phosphorothioate linkage
  modified_base 8: mod_base = OTHER; note = 2'-O-methoxyethyl modified nucleotide with phosphorothioate linkage
  modified_base 9: mod_base = OTHER; note = 2'-O-methoxyethyl modified nucleotide with phosphorothioate linkage
  modified_base 10: mod_base = OTHER; note = 2'-O-methoxyethyl modified nucleotide with phosphorothioate linkage
  modified_base 11: mod_base = OTHER; note = 2'-O-methoxyethyl modified nucleotide with phosphorothioate linkage
  modified_base 12: mod_base = OTHER; note = 2'-O-methoxyethyl modified nucleotide with phosphorothioate linkage
  modified_base 13: mod_base = OTHER; note = 2'-O-methoxyethyl modified thymine with phosphorothioate linkage
  modified_base 14: mod_base = OTHER; note = 2'-O-methoxyethyl modified nucleotide with phosphorothioate linkage
  modified_base 15: mod_base = OTHER; note = 2'-O-methoxyethyl modified thymine with phosphorothioate linkage
  modified_base 16: mod_base = OTHER; note = 2'-O-methoxyethyl modified nucleotide with phosphorothioate linkage
  modified_base 17: mod_base = OTHER; note = 2'-O-methoxyethyl modified nucleotide with phosphorothioate linkage
  modified_base 18: mod_base = OTHER; note = 2'-O-methoxyethyl modified nucleotide with phosphorothioate linkage
  modified_base 19: mod_base = OTHER; note = 2'-O-methoxyethyl 5-methylcytosine with phosphorothioate linkage
  modified_base 20: mod_base = OTHER; note = 2'-O-methoxyethyl 5-methylcytosine
atccgaaagaagtatgaacc

SEQ ID NO: 312 - RNA, 20 nt, synthetic construct
  source 1..20: mol_type = other RNA
  modified_base 1: mod_base = OTHER; note = 2'-O-methoxyethyl modified nucleotide with phosphorothioate linkage
  modified_base 2: mod_base = OTHER; note = 2'-O-methoxyethyl modified thymine with phosphorothioate linkage
  modified_base 3: mod_base = OTHER; note = 2'-O-methoxyethyl 5-methylcytosine with phosphorothioate linkage
  modified_base 4: mod_base = OTHER; note = 2'-O-methoxyethyl 5-methylcytosine with phosphorothioate linkage
  modified_base 5: mod_base = OTHER; note = 2'-O-methoxyethyl modified nucleotide with phosphorothioate linkage
  modified_base 6: mod_base = OTHER; note = 2'-O-methoxyethyl modified nucleotide with phosphorothioate linkage
  modified_base 7: mod_base = OTHER; note = 2'-O-methoxyethyl modified nucleotide with phosphorothioate linkage
  modified_base 8: mod_base = OTHER; note = 2'-O-methoxyethyl modified nucleotide with phosphorothioate linkage
  modified_base 9: mod_base = OTHER; note = 2'-O-methoxyethyl modified nucleotide with phosphorothioate linkage
  modified_base 10: mod_base = OTHER; note = 2'-O-methoxyethyl modified nucleotide with phosphorothioate linkage
  modified_base 11: mod_base = OTHER; note = 2'-O-methoxyethyl modified nucleotide with phosphorothioate linkage
  modified_base 12: mod_base = OTHER; note = 2'-O-methoxyethyl modified nucleotide with phosphorothioate linkage
  modified_base 13: mod_base = OTHER; note = 2'-O-methoxyethyl modified thymine with phosphorothioate linkage
  modified_base 14: mod_base = OTHER; note = 2'-O-methoxyethyl modified nucleotide with phosphorothioate linkage
  modified_base 15: mod_base = OTHER; note = 2'-O-methoxyethyl modified thymine with phosphorothioate linkage
  modified_base 16: mod_base = OTHER; note = 2'-O-methoxyethyl modified nucleotide with phosphorothioate linkage
  modified_base 17: mod_base = OTHER; note = 2'-O-methoxyethyl modified nucleotide with phosphorothioate linkage
  modified_base 18: mod_base = OTHER; note = 2'-O-methoxyethyl modified nucleotide with phosphorothioate linkage
  modified_base 19: mod_base = OTHER; note = 2'-O-methoxyethyl 5-methylcytosine with phosphorothioate linkage
  modified_base 20: mod_base = OTHER; note = 2'-O-methoxyethyl 5-methylcytosine
atccgaaagaagtatgaacc

SEQ ID NO: 313 - RNA, 20 nt, synthetic construct
  source 1..20: mol_type = other RNA
  modified_base 1: mod_base = OTHER; note = 2'-O-methoxyethyl modified nucleotide with phosphorothioate linkage
  modified_base 2: mod_base = OTHER; note = 2'-O-methoxyethyl modified thymine with phosphorothioate linkage
  modified_base 3: mod_base = OTHER; note = 2'-O-methoxyethyl 5-methylcytosine with phosphorothioate linkage
  modified_base 4: mod_base = OTHER; note = 2'-O-methoxyethyl 5-methylcytosine with phosphorothioate linkage
  modified_base 5: mod_base = OTHER; note = 2'-O-methoxyethyl modified nucleotide with phosphorothioate linkage
  modified_base 6: mod_base = OTHER; note = 2'-O-methoxyethyl modified nucleotide with phosphorothioate linkage
  modified_base 7: mod_base = OTHER; note = 2'-O-methoxyethyl modified nucleotide with phosphorothioate linkage
  modified_base 8: mod_base = OTHER; note = 2'-O-methoxyethyl modified nucleotide with phosphorothioate linkage
  modified_base 9: mod_base = OTHER; note = 2'-O-methoxyethyl modified nucleotide with phosphorothioate linkage
  modified_base 10: mod_base = OTHER; note = 2'-O-methoxyethyl modified nucleotide with phosphorothioate linkage
  modified_base 11: mod_base = OTHER; note = 2'-O-methoxyethyl modified nucleotide with phosphorothioate linkage
  modified_base 12: mod_base = OTHER; note = 2'-O-methoxyethyl modified nucleotide with phosphorothioate linkage
  modified_base 13: mod_base = OTHER; note = 2'-O-methoxyethyl modified thymine with phosphorothioate linkage
  modified_base 14: mod_base = OTHER; note = 2'-O-methoxyethyl modified nucleotide with phosphorothioate linkage
  modified_base 15: mod_base = OTHER; note = 2'-O-methoxyethyl modified thymine with phosphorothioate linkage
  modified_base 16: mod_base = OTHER; note = 2'-O-methoxyethyl modified nucleotide with phosphorothioate linkage
  modified_base 17: mod_base = OTHER; note = 2'-O-methoxyethyl modified nucleotide with phosphorothioate linkage
  modified_base 18: mod_base = OTHER; note = 2'-O-methoxyethyl modified nucleotide with phosphorothioate linkage
  modified_base 19: mod_base = OTHER; note = 2'-O-methoxyethyl 5-methylcytosine with phosphorothioate linkage
  modified_base 20: mod_base = OTHER; note = 2'-O-methoxyethyl 5-methylcytosine
atccgaaagaagtatgaacc

SEQ ID NO: 314 - RNA, 20 nt, synthetic construct
  source 1..20: mol_type = other RNA
  modified_base 1: mod_base = OTHER; note = 2'-O-methoxyethyl modified nucleotide with phosphorothioate linkage
  modified_base 2: mod_base = OTHER; note = 2'-O-methoxyethyl modified thymine with phosphorothioate linkage
  modified_base 3: mod_base = OTHER; note = 2'-O-methoxyethyl 5-methylcytosine with phosphorothioate linkage
  modified_base 4: mod_base = OTHER; note = 2'-O-methoxyethyl 5-methylcytosine with phosphorothioate linkage
  modified_base 5: mod_base = OTHER; note = 2'-O-methoxyethyl modified nucleotide with phosphorothioate linkage
  modified_base 6: mod_base = OTHER; note = 2'-O-methoxyethyl modified nucleotide with phosphorothioate linkage
  modified_base 7: mod_base = OTHER; note = 2'-O-methoxyethyl modified nucleotide with phosphorothioate linkage
  modified_base 8: mod_base = OTHER; note = 2'-O-methoxyethyl modified nucleotide with phosphorothioate linkage
  modified_base 9: mod_base = OTHER; note = 2'-O-methoxyethyl modified nucleotide with phosphorothioate linkage
  modified_base 10: mod_base = OTHER; note = 2'-O-methoxyethyl modified nucleotide with phosphorothioate linkage
  modified_base 11: mod_base = OTHER; note = 2'-O-methoxyethyl modified nucleotide with phosphorothioate linkage
  modified_base 12: mod_base = OTHER; note = 2'-O-methoxyethyl modified nucleotide with phosphorothioate linkage
  modified_base 13: mod_base = OTHER; note = 2'-O-methoxyethyl modified thymine with phosphorothioate linkage
  modified_base 14: mod_base = OTHER; note = 2'-O-methoxyethyl modified nucleotide with phosphorothioate linkage
  modified_base 15: mod_base = OTHER; note = 2'-O-methoxyethyl modified thymine with phosphorothioate linkage
  modified_base 16: mod_base = OTHER; note = 2'-O-methoxyethyl modified nucleotide with phosphorothioate linkage
  modified_base 17: mod_base = OTHER; note = 2'-O-methoxyethyl modified nucleotide with phosphorothioate linkage
  modified_base 18: mod_base = OTHER; note = 2'-O-methoxyethyl modified nucleotide with phosphorothioate linkage
  modified_base 19: mod_base = OTHER; note = 2'-O-methoxyethyl 5-methylcytosine with phosphorothioate linkage
  modified_base 20: mod_base = OTHER; note = 2'-O-methoxyethyl 5-methylcytosine
atccgaaagaagtatgaacc

SEQ ID NO: 315 - RNA, 20 nt, synthetic construct
  source 1..20: mol_type = other RNA
  modified_base 1: mod_base = OTHER; note = 2'-O-methoxyethyl modified nucleotide with phosphorothioate linkage
  modified_base 2: mod_base = OTHER; note = 2'-O-methoxyethyl modified thymine with phosphorothioate linkage
  modified_base 3: mod_base = OTHER; note = 2'-O-methoxyethyl 5-methylcytosine with phosphorothioate linkage
  modified_base 4: mod_base = OTHER; note = 2'-O-methoxyethyl 5-methylcytosine with phosphorothioate linkage
  modified_base 5: mod_base = OTHER; note = 2'-O-methoxyethyl modified nucleotide with phosphorothioate linkage
  modified_base 6: mod_base = OTHER; note = 2'-O-methoxyethyl modified nucleotide with phosphorothioate linkage
  modified_base 7: mod_base = OTHER; note = 2'-O-methoxyethyl modified nucleotide with phosphorothioate linkage
  modified_base 8: mod_base = OTHER; note = 2'-O-methoxyethyl modified nucleotide with phosphorothioate linkage
  modified_base 9: mod_base = OTHER; note = 2'-O-methoxyethyl modified nucleotide with phosphorothioate linkage
  modified_base 10: mod_base = OTHER; note = 2'-O-methoxyethyl modified nucleotide with phosphorothioate linkage
  modified_base 11: mod_base = OTHER; note = 2'-O-methoxyethyl modified nucleotide with phosphorothioate linkage
  modified_base 12: mod_base = OTHER; note = 2'-O-methoxyethyl modified nucleotide with phosphorothioate linkage
  modified_base 13: mod_base = OTHER; note = 2'-O-methoxyethyl modified thymine with phosphorothioate linkage
  modified_base 14: mod_base = OTHER; note = 2'-O-methoxyethyl modified nucleotide with phosphorothioate linkage
  modified_base 15: mod_base = OTHER; note = 2'-O-methoxyethyl modified thymine with phosphorothioate linkage
  modified_base 16: mod_base = OTHER; note = 2'-O-methoxyethyl modified nucleotide with phosphorothioate linkage
  modified_base 17: mod_base = OTHER; note = 2'-O-methoxyethyl modified nucleotide with phosphorothioate linkage
  modified_base 18: mod_base = OTHER; note = 2'-O-methoxyethyl modified nucleotide with phosphorothioate linkage
  modified_base 19: mod_base = OTHER; note = 2'-O-methoxyethyl 5-methylcytosine with phosphorothioate linkage
  modified_base 20: mod_base = OTHER; note = 2'-O-methoxyethyl 5-methylcytosine
atccgaaagaagtatgaacc

SEQ ID NO: 316 - RNA, 20 nt, synthetic construct
  source 1..20: mol_type = other RNA
  modified_base 1: mod_base = OTHER; note = 2'-O-methoxyethyl modified nucleotide with phosphorothioate linkage
  modified_base 2: mod_base = OTHER; note = 2'-O-methoxyethyl modified thymine with phosphorothioate linkage
  modified_base 3: mod_base = OTHER; note = 2'-O-methoxyethyl 5-methylcytosine with phosphorothioate linkage
  modified_base 4: mod_base = OTHER; note = 2'-O-methoxyethyl 5-methylcytosine
  modified_base 5: mod_base = OTHER; note = 2'-O-methoxyethyl modified nucleotide with phosphorothioate linkage
  modified_base 6: mod_base = OTHER; note = 2'-O-methoxyethyl modified nucleotide with phosphorothioate linkage
  modified_base 7: mod_base = OTHER; note = 2'-O-methoxyethyl modified nucleotide with phosphorothioate linkage
  modified_base 8: mod_base = OTHER; note = 2'-O-methoxyethyl modified nucleotide with phosphorothioate linkage
  modified_base 9: mod_base = OTHER; note = 2'-O-methoxyethyl modified nucleotide with phosphorothioate linkage
  modified_base 10: mod_base = OTHER; note = 2'-O-methoxyethyl modified nucleotide with phosphorothioate linkage
  modified_base 11: mod_base = OTHER; note = 2'-O-methoxyethyl modified nucleotide with phosphorothioate linkage
  modified_base 12: mod_base = OTHER; note = 2'-O-methoxyethyl modified nucleotide with phosphorothioate linkage
  modified_base 13: mod_base = OTHER; note = 2'-O-methoxyethyl modified thymine with phosphorothioate linkage
  modified_base 14: mod_base = OTHER; note = 2'-O-methoxyethyl modified nucleotide with phosphorothioate linkage
  modified_base 15: mod_base = OTHER; note = 2'-O-methoxyethyl modified thymine with phosphorothioate linkage
  modified_base 16: mod_base = OTHER; note = 2'-O-methoxyethyl modified nucleotide
  modified_base 17: mod_base = OTHER; note = 2'-O-methoxyethyl modified nucleotide with phosphorothioate linkage
  modified_base 18: mod_base = OTHER; note = 2'-O-methoxyethyl modified nucleotide with phosphorothioate linkage
  modified_base 19: mod_base = OTHER; note = 2'-O-methoxyethyl 5-methylcytosine with phosphorothioate linkage
  modified_base 20: mod_base = OTHER; note = 2'-O-methoxyethyl 5-methylcytosine
atccgaaagaagtatgaacc

SEQ ID NO: 317 - RNA, 20 nt, synthetic construct
  source 1..20: mol_type = other RNA
  modified_base 1: mod_base = OTHER; note = 2'-O-methoxyethyl modified nucleotide with phosphorothioate linkage
  modified_base 2: mod_base = OTHER; note = 2'-O-methoxyethyl modified thymine with phosphorothioate linkage
  modified_base 3: mod_base = OTHER; note = 2'-O-methoxyethyl 5-methylcytosine with phosphorothioate linkage
  modified_base 4: mod_base = OTHER; note = 2'-O-methoxyethyl 5-methylcytosine
  modified_base 5: mod_base = OTHER; note = 2'-O-methoxyethyl modified nucleotide with phosphorothioate linkage
  modified_base 6: mod_base = OTHER; note = 2'-O-methoxyethyl modified nucleotide with phosphorothioate linkage
  modified_base 7: mod_base = OTHER; note = 2'-O-methoxyethyl modified nucleotide with phosphorothioate linkage
  modified_base 8: mod_base = OTHER; note = 2'-O-methoxyethyl modified nucleotide with phosphorothioate linkage
  modified_base 9: mod_base = OTHER; note = 2'-O-methoxyethyl modified nucleotide with phosphorothioate linkage
  modified_base 10: mod_base = OTHER; note = 2'-O-methoxyethyl modified nucleotide with phosphorothioate linkage
  modified_base 11: mod_base = OTHER; note = 2'-O-methoxyethyl modified nucleotide with phosphorothioate linkage
  modified_base 12: mod_base = OTHER; note = 2'-O-methoxyethyl modified nucleotide with phosphorothioate linkage
  modified_base 13: mod_base = OTHER; note = 2'-O-methoxyethyl modified thymine with phosphorothioate linkage
  modified_base 14: mod_base = OTHER; note = 2'-O-methoxyethyl modified nucleotide with phosphorothioate linkage
  modified_base 15: mod_base = OTHER; note = 2'-O-methoxyethyl modified thymine with phosphorothioate linkage
  modified_base 16: mod_base = OTHER; note = 2'-O-methoxyethyl modified nucleotide
  modified_base 17: mod_base = OTHER; note = 2'-O-methoxyethyl modified nucleotide with phosphorothioate linkage
  modified_base 18: mod_base = OTHER; note = 2'-O-methoxyethyl modified nucleotide with phosphorothioate linkage
  modified_base 19: mod_base = OTHER; note = 2'-O-methoxyethyl 5-methylcytosine with phosphorothioate linkage
  modified_base 20: mod_base = OTHER; note = 2'-O-methoxyethyl 5-methylcytosine
atccgaaagaagtatgaacc

SEQ ID NO: 318 - RNA, 20 nt, synthetic construct
  source 1..20: mol_type = other RNA
  modified_base 1: mod_base = OTHER; note = 2'-O-methoxyethyl modified nucleotide with phosphorothioate linkage
  modified_base 2: mod_base = OTHER; note = 2'-O-methoxyethyl modified thymine with phosphorothioate linkage
  modified_base 3: mod_base = OTHER; note = 2'-O-methoxyethyl 5-methylcytosine with phosphorothioate linkage
  modified_base 4: mod_base = OTHER; note = 2'-O-methoxyethyl 5-methylcytosine
  modified_base 5: mod_base = OTHER; note = 2'-O-methoxyethyl modified nucleotide with phosphorothioate linkage
  modified_base 6: mod_base = OTHER; note = 2'-O-methoxyethyl modified nucleotide with phosphorothioate linkage
  modified_base 7: mod_base = OTHER; note = 2'-O-methoxyethyl modified nucleotide with phosphorothioate linkage
  modified_base 8: mod_base = OTHER; note = 2'-O-methoxyethyl modified nucleotide with phosphorothioate linkage
  modified_base 9: mod_base = OTHER; note = 2'-O-methoxyethyl modified nucleotide
  modified_base 10: mod_base = OTHER; note = 2'-O-methoxyethyl modified nucleotide with phosphorothioate linkage
  modified_base 11: mod_base = OTHER; note = 2'-O-methoxyethyl modified nucleotide with phosphorothioate linkage
  modified_base 12: mod_base = OTHER; note = 2'-O-methoxyethyl modified nucleotide
  modified_base 13: mod_base = OTHER; note = 2'-O-methoxyethyl modified thymine with phosphorothioate linkage
  modified_base 14: mod_base = OTHER; note = 2'-O-methoxyethyl modified nucleotide with phosphorothioate linkage
  modified_base 15: mod_base = OTHER; note = 2'-O-methoxyethyl modified thymine with phosphorothioate linkage
  modified_base 16: mod_base = OTHER; note = 2'-O-methoxyethyl modified nucleotide
  modified_base 17: mod_base = OTHER; note = 2'-O-methoxyethyl modified nucleotide with phosphorothioate linkage
  modified_base 18: mod_base = OTHER; note = 2'-O-methoxyethyl modified nucleotide with phosphorothioate linkage
  modified_base 19: mod_base = OTHER; note = 2'-O-methoxyethyl 5-methylcytosine with phosphorothioate linkage
  modified_base 20: mod_base = OTHER; note = 2'-O-methoxyethyl 5-methylcytosine
atccgaaagaagtatgaacc

SEQ ID NO: 319 - DNA, 21 bp, synthetic construct
  source 1..21: mol_type = other DNA
  modified_base 1: mod_base = OTHER; note = Sarcosine attached via phosphorodiamidate to nucleotide
  modified_base 1..21: mod_base = OTHER; note = Phosphorodiamidate morpholino backbone
cctcacctgtcacatgcacag

SEQ ID NO: 320 - DNA, 21 bp, synthetic construct
  source 1..21: mol_type = other DNA
  modified_base 1: mod_base = OTHER; note = Sarcosine attached via phosphorodiamidate to nucleotide
  modified_base 1..21: mod_base = OTHER; note = Phosphorodiamidate morpholino backbone
cctcacctgtcacatgcacag

SEQ ID NO: 321 - RNA, 18 nt, synthetic construct
  source 1..18: mol_type = other RNA
  modified_base 1: mod_base = OTHER; note = 2'-O-methoxyethyl 5-methylcytosine with phosphorothioate linkage
  modified_base 2: mod_base = OTHER; note = 2'-O-methoxyethyl 5-methylcytosine with phosphorothioate linkage
  modified_base 3: mod_base = OTHER; note = 2'-O-methoxyethyl modified nucleotide with phosphorothioate linkage
  modified_base 4: mod_base = OTHER; note = 2'-O-methoxyethyl modified nucleotide
  modified_base 5: mod_base = OTHER; note = locked nucleic acid with phosphorothioate linkage
  modified_base 6: mod_base = OTHER; note = 2'-O-methoxyethyl modified nucleotide with phosphorothioate linkage
  modified_base 7: mod_base = OTHER; note = 2'-O-methoxyethyl modified nucleotide with phosphorothioate linkage
  modified_base 8: mod_base = OTHER; note = 2'-O-methoxyethyl modified nucleotide with phosphorothioate linkage
  modified_base 9: mod_base = OTHER; note = 2'-O-methoxyethyl modified nucleotide with phosphorothioate linkage
  modified_base 10: mod_base = OTHER; note = 2'-O-methoxyethyl modified nucleotide with phosphorothioate linkage
  modified_base 11: mod_base = OTHER; note = 2'-O-methoxyethyl modified thymine with phosphorothioate linkage
  modified_base 12: mod_base = OTHER; note = 2'-O-methoxyethyl modified nucleotide with phosphorothioate linkage
  modified_base 13: mod_base = OTHER; note = 2'-O-methoxyethyl modified thymine with phosphorothioate linkage
  modified_base 14: mod_base = OTHER; note = 2'-O-methoxyethyl modified nucleotide with phosphorothioate linkage
  modified_base 15: mod_base = OTHER; note = 2'-O-methoxyethyl modified nucleotide with phosphorothioate linkage
  modified_base 16: mod_base = OTHER; note = 2'-O-methoxyethyl modified nucleotide with phosphorothioate linkage
  modified_base 17: mod_base = OTHER; note = 2'-O-methoxyethyl 5-methylcytosine with phosphorothioate linkage
  modified_base 18: mod_base = OTHER; note = 2'-O-methoxyethyl 5-methylcytosine
ccgaaagaagtatgaacc

SEQ ID NO: 322 - RNA, 18 nt, synthetic construct
  source 1..18: mol_type = other RNA
  modified_base 1: mod_base = OTHER; note = 2'-O-methoxyethyl 5-methylcytosine with phosphorothioate linkage
  modified_base 2: mod_base = OTHER; note = 2'-O-methoxyethyl 5-methylcytosine with phosphorothioate linkage
  modified_base 3: mod_base = OTHER; note = 2'-O-methoxyethyl modified nucleotide with phosphorothioate linkage
  modified_base 4: mod_base = OTHER; note = 2'-O-methoxyethyl modified nucleotide
  modified_base 5: mod_base = OTHER; note = locked nucleic acid with phosphorothioate linkage
  modified_base 6: mod_base = OTHER; note = 2'-O-methoxyethyl modified nucleotide with phosphorothioate linkage
  modified_base 7: mod_base = OTHER; note = 2'-O-methoxyethyl modified nucleotide with phosphorothioate linkage
  modified_base 8: mod_base = OTHER; note = 2'-O-methoxyethyl modified nucleotide with phosphorothioate linkage
  modified_base 9: mod_base = OTHER; note = 2'-O-methoxyethyl modified nucleotide with phosphorothioate linkage
  modified_base 10: mod_base = OTHER; note = 2'-O-methoxyethyl modified nucleotide with phosphorothioate linkage
  modified_base 11: mod_base = OTHER; note = 2'-O-methoxyethyl modified thymine with phosphorothioate linkage
  modified_base 12: mod_base = OTHER; note = 2'-O-methoxyethyl modified nucleotide with phosphorothioate linkage
  modified_base 13: mod_base = OTHER; note = 2'-O-methoxyethyl modified thymine with phosphorothioate linkage
  modified_base 14: mod_base = OTHER; note = 2'-O-methoxyethyl modified nucleotide
  modified_base 15: mod_base = OTHER; note = locked nucleic acid with phosphorothioate linkage
  modified_base 16: mod_base = OTHER; note = 2'-O-methoxyethyl modified nucleotide with phosphorothioate linkage
  modified_base 17: mod_base = OTHER; note = 2'-O-methoxyethyl 5-methylcytosine with phosphorothioate linkage
  modified_base 18: mod_base = OTHER; note = 2'-O-methoxyethyl 5-methylcytosine
ccgaaagaagtatgaacc

SEQ ID NO: 323 - RNA, 18 nt, synthetic construct
  source 1..18: mol_type = other RNA
  modified_base 1: mod_base = OTHER; note = 2'-O-methoxyethyl 5-methylcytosine with phosphorothioate linkage
  modified_base 2: mod_base = OTHER; note = 2'-O-methoxyethyl 5-methylcytosine with phosphorothioate linkage
  modified_base 3: mod_base = OTHER; note = 2'-O-methoxyethyl modified nucleotide with phosphorothioate linkage
  modified_base 4: mod_base = OTHER; note = 2'-O-methoxyethyl modified nucleotide
  modified_base 5: mod_base = OTHER; note = locked nucleic acid with phosphorothioate linkage
  modified_base 6: mod_base = OTHER; note = 2'-O-methoxyethyl modified nucleotide with phosphorothioate linkage
  modified_base 7: mod_base = OTHER; note = 2'-O-methoxyethyl modified nucleotide with phosphorothioate linkage
  modified_base 8: mod_base = OTHER; note = 2'-O-methoxyethyl modified nucleotide with phosphorothioate linkage
  modified_base 9: mod_base = OTHER; note = 2'-O-methoxyethyl modified nucleotide with phosphorothioate linkage
  modified_base 10: mod_base = OTHER; note = 2'-O-methoxyethyl modified nucleotide with phosphorothioate linkage
  modified_base 11: mod_base = OTHER; note = locked thymine with phosphorothioate linkage
  modified_base 12: mod_base = OTHER; note = 2'-O-methoxyethyl modified nucleotide with phosphorothioate linkage
  modified_base 13: mod_base = OTHER; note = 2'-O-methoxyethyl modified thymine with phosphorothioate linkage
  modified_base 14: mod_base = OTHER; note = 2'-O-methoxyethyl modified nucleotide
  modified_base 15: mod_base = OTHER; note = locked nucleic acid with phosphorothioate linkage
  modified_base 16: mod_base = OTHER; note = 2'-O-methoxyethyl modified nucleotide with phosphorothioate linkage
  modified_base 17: mod_base = OTHER; note = 2'-O-methoxyethyl 5-methylcytosine with phosphorothioate linkage
  modified_base 18: mod_base = OTHER; note = 2'-O-methoxyethyl 5-methylcytosine
ccgaaagaagtatgaacc

SEQ ID NO: 324 - RNA, 18 nt, synthetic construct
  source 1..18: mol_type = other RNA
  modified_base 1: mod_base = OTHER; note = 2'-O-methoxyethyl 5-methylcytosine with phosphorothioate linkage
  modified_base 2: mod_base = OTHER; note = 2'-O-methoxyethyl 5-methylcytosine with phosphorothioate linkage
  modified_base 3: mod_base = OTHER; note = 2'-O-methoxyethyl modified nucleotide
  modified_base 4: mod_base = OTHER; note = 2'-O-methoxyethyl modified nucleotide with phosphorothioate linkage
  modified_base 5: mod_base = OTHER; note = 2'-O-methoxyethyl modified nucleotide with phosphorothioate linkage
  modified_base 6: mod_base = OTHER; note = 2'-O-methoxyethyl modified nucleotide with phosphorothioate linkage
  modified_base 7: mod_base = OTHER; note = 2'-O-methoxyethyl modified nucleotide with phosphorothioate linkage
  modified_base 8: mod_base = OTHER; note = 2'-O-methoxyethyl modified nucleotide with phosphorothioate linkage
  modified_base 9: mod_base = OTHER; note = 2'-O-methoxyethyl modified nucleotide with phosphorothioate linkage
  modified_base 10: mod_base = OTHER; note = 2'-O-methoxyethyl modified nucleotide with phosphorothioate linkage
  modified_base 11: mod_base = OTHER; note = 2'-O-methoxyethyl modified thymine with phosphorothioate linkage
  modified_base 12: mod_base = OTHER; note = 2'-O-methoxyethyl modified nucleotide with phosphorothioate linkage
  modified_base 13: mod_base = OTHER; note = 2'-O-methoxyethyl modified thymine with phosphorothioate linkage
  modified_base 14: mod_base = OTHER; note = 2'-O-methoxyethyl modified nucleotide with phosphorothioate linkage
  modified_base 15: mod_base = OTHER; note = 2'-O-methoxyethyl modified nucleotide
  modified_base 16: mod_base = OTHER; note = 2'-O-methoxyethyl modified nucleotide with phosphorothioate linkage
  modified_base 17: mod_base = OTHER; note = 2'-O-methoxyethyl 5-methylcytosine with phosphorothioate linkage
  modified_base 18: mod_base = OTHER; note = 2'-O-methoxyethyl 5-methylcytosine
ccgaaagaagtatgaacc

SEQ ID NO: 325 - RNA, 18 nt, synthetic construct
  source 1..18: mol_type = other RNA
  modified_base 1: mod_base = OTHER; note = 2'-O-methoxyethyl 5-methylcytosine with phosphorothioate linkage
  modified_base 2: mod_base = OTHER; note = 2'-O-methoxyethyl 5-methylcytosine with phosphorothioate linkage
  modified_base 3: mod_base = OTHER; note = 2'-O-methoxyethyl modified nucleotide with phosphorothioate linkage
  modified_base 4: mod_base = OTHER; note = 2'-O-methoxyethyl modified nucleotide
  modified_base 5: mod_base = OTHER; note = 2'-O-methoxyethyl modified nucleotide with phosphorothioate linkage
  modified_base 6: mod_base = OTHER; note = 2'-O-methoxyethyl modified nucleotide with phosphorothioate linkage
  modified_base 7: mod_base = OTHER; note = 2'-O-methoxyethyl modified nucleotide with phosphorothioate linkage
  modified_base 8: mod_base = OTHER; note = 2'-O-methoxyethyl modified nucleotide with phosphorothioate linkage
  modified_base 9: mod_base = OTHER; note = 2'-O-methoxyethyl modified nucleotide with phosphorothioate linkage
  modified_base 10: mod_base = OTHER; note = 2'-O-methoxyethyl modified nucleotide with phosphorothioate linkage
  modified_base 11: mod_base = OTHER; note = 2'-O-methoxyethyl modified thymine with phosphorothioate linkage
  modified_base 12: mod_base = OTHER; note = 2'-O-methoxyethyl modified nucleotide with phosphorothioate linkage
  modified_base 13: mod_base = OTHER; note = 2'-O-methoxyethyl modified thymine with phosphorothioate linkage
  modified_base 14: mod_base = OTHER; note = 2'-O-methoxyethyl modified nucleotide
  modified_base 15: mod_base = OTHER; note = 2'-O-methoxyethyl modified nucleotide with phosphorothioate linkage
  modified_base 16: mod_base = OTHER; note = 2'-O-methoxyethyl modified nucleotide with phosphorothioate linkage
  modified_base 17: mod_base = OTHER; note = 2'-O-methoxyethyl 5-methylcytosine with phosphorothioate linkage
  modified_base 18: mod_base = OTHER; note = 2'-O-methoxyethyl 5-methylcytosine
ccgaaagaagtatgaacc

SEQ ID NO: 326 - RNA, 18 nt, synthetic construct
  source 1..18: mol_type = other RNA
  modified_base 1: mod_base = OTHER; note = 2'-O-methoxyethyl 5-methylcytosine with phosphorothioate linkage
  modified_base 2: mod_base = OTHER; note = 2'-O-methoxyethyl 5-methylcytosine with phosphorothioate linkage
  modified_base 3: mod_base = OTHER; note = 2'-O-methoxyethyl modified nucleotide with phosphorothioate linkage
  modified_base 4: mod_base = OTHER; note = 2'-O-methoxyethyl modified nucleotide with phosphorothioate linkage
  modified_base 5: mod_base = OTHER; note = 2'-O-methoxyethyl modified nucleotide
  modified_base 6: mod_base = OTHER; note = 2'-O-methoxyethyl modified nucleotide with phosphorothioate linkage
  modified_base 7: mod_base = OTHER; note = 2'-O-methoxyethyl modified nucleotide with phosphorothioate linkage
  modified_base 8: mod_base = OTHER; note = 2'-O-methoxyethyl modified nucleotide with phosphorothioate linkage
  modified_base 9: mod_base = OTHER; note = 2'-O-methoxyethyl modified nucleotide
  modified_base 10: mod_base = OTHER; note = 2'-O-methoxyethyl modified nucleotide with phosphorothioate linkage
  modified_base 11: mod_base = OTHER; note = 2'-O-methoxyethyl modified thymine with phosphorothioate linkage
  modified_base 12: mod_base = OTHER; note = 2'-O-methoxyethyl modified nucleotide with phosphorothioate linkage
  modified_base 13: mod_base = OTHER; note = 2'-O-methoxyethyl modified thymine with phosphorothioate linkage
  modified_base 14: mod_base = OTHER; note = 2'-O-methoxyethyl modified nucleotide
  modified_base 15: mod_base = OTHER; note = 2'-O-methoxyethyl modified nucleotide with phosphorothioate linkage
  modified_base 16: mod_base = OTHER; note = 2'-O-methoxyethyl modified nucleotide with phosphorothioate linkage
  modified_base 17: mod_base = OTHER; note = 2'-O-methoxyethyl 5-methylcytosine with phosphorothioate linkage
  modified_base 18: mod_base = OTHER; note = 2'-O-methoxyethyl 5-methylcytosine
ccgaaagaagtatgaacc

SEQ ID NO: 327 - RNA, 18 nt, synthetic construct
  source 1..18: mol_type = other RNA
  modified_base 1: mod_base = OTHER; note = 2'-O-methoxyethyl 5-methylcytosine with phosphorothioate linkage
  modified_base 2: mod_base = OTHER; note = 2'-O-methoxyethyl 5-methylcytosine with phosphorothioate linkage
  modified_base 3: mod_base = OTHER; note = 2'-O-methoxyethyl modified nucleotide with phosphorothioate linkage
  modified_base 4: mod_base = OTHER; note = 2'-O-methoxyethyl modified nucleotide with phosphorothioate linkage
  modified_base 5: mod_base = OTHER; note = 2'-O-methoxyethyl modified nucleotide
  modified_base 6: mod_base = OTHER; note = 2'-O-methoxyethyl modified nucleotide with phosphorothioate linkage
  modified_base 7: mod_base = OTHER; note = 2'-O-methoxyethyl modified nucleotide with phosphorothioate linkage
  modified_base 8: mod_base = OTHER; note = 2'-O-methoxyethyl modified nucleotide with phosphorothioate linkage
  modified_base 9: mod_base = OTHER; note = 2'-O-methoxyethyl modified nucleotide with phosphorothioate linkage
  modified_base 10: mod_base = OTHER; note = 2'-O-methoxyethyl modified nucleotide with phosphorothioate linkage
  modified_base 11: mod_base = OTHER; note = 2'-O-methoxyethyl modified thymine with phosphorothioate linkage
  modified_base 12: mod_base = OTHER; note = 2'-O-methoxyethyl modified nucleotide with phosphorothioate linkage
  modified_base 13: mod_base = OTHER; note = 2'-O-methoxyethyl modified thymine
  modified_base 14: mod_base = OTHER; note = 2'-O-methoxyethyl modified nucleotide with phosphorothioate linkage
  modified_base 15: mod_base = OTHER; note = 2'-O-methoxyethyl modified nucleotide with phosphorothioate linkage
  modified_base 16: mod_base = OTHER; note = 2'-O-methoxyethyl modified nucleotide with phosphorothioate linkage
  modified_base 17: mod_base = OTHER; note = 2'-O-methoxyethyl 5-methylcytosine with phosphorothioate linkage
  modified_base 18: mod_base = OTHER; note = 2'-O-methoxyethyl 5-methylcytosine
ccgaaagaagtatgaacc

SEQ ID NO: 328 - RNA, 18 nt, synthetic construct
  source 1..18: mol_type = other RNA
  modified_base 1: mod_base = OTHER; note = 2'-O-methoxyethyl 5-methylcytosine with phosphorothioate linkage
  modified_base 2: mod_base = OTHER; note = 2'-O-methoxyethyl 5-methylcytosine with phosphorothioate linkage
  modified_base 3: mod_base = OTHER; note = 2'-O-methoxyethyl modified nucleotide
  modified_base 4: mod_base = OTHER; note = 2'-O-methoxyethyl modified nucleotide
  modified_base 5: mod_base = OTHER; note = 2'-O-methoxyethyl modified nucleotide with phosphorothioate linkage
  modified_base 6: mod_base = OTHER; note = 2'-O-methoxyethyl modified nucleotide with phosphorothioate linkage
  modified_base 7: mod_base = OTHER; note = 2'-O-methoxyethyl modified nucleotide with phosphorothioate linkage
  modified_base 8: mod_base = OTHER; note = 2'-O-methoxyethyl modified nucleotide with phosphorothioate linkage
  modified_base 9: mod_base = OTHER; note = 2'-O-methoxyethyl modified nucleotide with phosphorothioate linkage
  modified_base 10: mod_base = OTHER; note = 2'-O-methoxyethyl modified nucleotide with phosphorothioate linkage
  modified_base 11: mod_base = OTHER; note = 2'-O-methoxyethyl modified thymine with phosphorothioate linkage
  modified_base 12: mod_base = OTHER; note = 2'-O-methoxyethyl modified nucleotide with phosphorothioate linkage
  modified_base 13: mod_base = OTHER; note = 2'-O-methoxyethyl modified thymine with phosphorothioate linkage
  modified_base 14: mod_base = OTHER; note = 2'-O-methoxyethyl modified nucleotide with phosphorothioate linkage
  modified_base 15: mod_base = OTHER; note = 2'-O-methoxyethyl modified nucleotide with phosphorothioate linkage
  modified_base 16: mod_base = OTHER; note = 2'-O-methoxyethyl modified nucleotide with phosphorothioate linkage
  modified_base 17: mod_base = OTHER; note = 2'-O-methoxyethyl 5-methylcytosine with phosphorothioate linkage
  modified_base 18: mod_base = OTHER; note = 2'-O-methoxyethyl 5-methylcytosine
ccgaaagaagtatgaacc

SEQ ID NO: 329 - RNA, 18 nt, synthetic construct
  source 1..18: mol_type = other RNA
  modified_base 1: mod_base = OTHER; note = 2'-O-methoxyethyl 5-methylcytosine with phosphorothioate linkage
  modified_base 2: mod_base = OTHER; note = 2'-O-methoxyethyl 5-methylcytosine with phosphorothioate linkage
  modified_base 3: mod_base = OTHER; note = 2'-O-methoxyethyl modified nucleotide
  modified_base 4: mod_base = OTHER; note = 2'-O-methoxyethyl modified nucleotide with phosphorothioate linkage
  modified_base 5: mod_base = OTHER; note = 2'-O-methoxyethyl modified nucleotide
  modified_base 6: mod_base = OTHER; note = 2'-O-methoxyethyl modified nucleotide with phosphorothioate linkage
  modified_base 7: mod_base = OTHER; note = 2'-O-methoxyethyl modified nucleotide with phosphorothioate linkage
  modified_base 8: mod_base = OTHER; note = 2'-O-methoxyethyl modified nucleotide with phosphorothioate linkage
  modified_base 9: mod_base = OTHER; note = 2'-O-methoxyethyl modified nucleotide with phosphorothioate linkage
  modified_base 10: mod_base = OTHER; note = 2'-O-methoxyethyl modified nucleotide with phosphorothioate linkage
  modified_base 11: mod_base = OTHER; note = 2'-O-methoxyethyl modified thymine with phosphorothioate linkage
  modified_base 12: mod_base = OTHER; note = 2'-O-methoxyethyl modified nucleotide with phosphorothioate linkage
  modified_base 13: mod_base = OTHER; note = 2'-O-methoxyethyl modified thymine with phosphorothioate linkage
  modified_base 14: mod_base = OTHER; note = 2'-O-methoxyethyl modified nucleotide with phosphorothioate linkage
  modified_base 15: mod_base = OTHER; note = 2'-O-methoxyethyl modified nucleotide with phosphorothioate linkage
  modified_base 16: mod_base = OTHER; note = 2'-O-methoxyethyl modified nucleotide with phosphorothioate linkage
  modified_base 17: mod_base = OTHER; note = 2'-O-methoxyethyl 5-methylcytosine with phosphorothioate linkage
  modified_base 18: mod_base = OTHER; note = 2'-O-methoxyethyl 5-methylcytosine
ccgaaagaagtatgaacc

SEQ ID NO: 330 - RNA, 18 nt, synthetic construct
  source 1..18: mol_type = other RNA
  modified_base 1: mod_base = OTHER; note = 2'-O-methoxyethyl 5-methylcytosine with phosphorothioate linkage
  modified_base 2: mod_base = OTHER; note = 2'-O-methoxyethyl 5-methylcytosine with phosphorothioate linkage
  modified_base 3: mod_base = OTHER; note = 2'-O-methoxyethyl modified nucleotide with phosphorothioate linkage
  modified_base 4: mod_base = OTHER; note = 2'-O-methoxyethyl modified nucleotide with phosphorothioate linkage
  modified_base 5: mod_base = OTHER; note = 2'-O-methoxyethyl modified nucleotide with phosphorothioate linkage
  modified_base 6: mod_base = OTHER; note = 2'-O-methoxyethyl modified nucleotide with phosphorothioate linkage
  modified_base 7: mod_base = OTHER; note = 2'-O-methoxyethyl modified nucleotide with phosphorothioate linkage
  modified_base 8: mod_base = OTHER; note = 2'-O-methoxyethyl modified nucleotide with phosphorothioate linkage
  modified_base 9: mod_base = OTHER; note = 2'-O-methoxyethyl modified nucleotide with phosphorothioate linkage
  modified_base 10: mod_base = OTHER; note = 2'-O-methoxyethyl modified nucleotide with phosphorothioate linkage
  modified_base 11: mod_base = OTHER; note = 2'-O-methoxyethyl modified thymine with phosphorothioate linkage
  modified_base 12: mod_base = OTHER; note = 2'-O-methoxyethyl modified nucleotide with phosphorothioate linkage
  modified_base 13: mod_base = OTHER; note = 2'-O-methoxyethyl modified thymine with phosphorothioate linkage
  modified_base 14: mod_base = OTHER; note = 2'-O-methoxyethyl modified nucleotide
  modified_base 15: mod_base = OTHER; note = 2'-O-methoxyethyl modified nucleotide
  modified_base 16: mod_base = OTHER; note = 2'-O-methoxyethyl modified nucleotide with phosphorothioate linkage
  modified_base 17: mod_base = OTHER; note = 2'-O-methoxyethyl 5-methylcytosine with phosphorothioate linkage
  modified_base 18: mod_base = OTHER; note = 2'-O-methoxyethyl 5-methylcytosine
ccgaaagaagtatgaacc

SEQ ID NO: 331 - RNA, 18 nt, synthetic construct
  source 1..18: mol_type = other RNA
  modified_base 1: mod_base = OTHER; note = 2'-O-methoxyethyl 5-methylcytosine with phosphorothioate linkage
  modified_base 2: mod_base = OTHER; note = 2'-O-methoxyethyl 5-methylcytosine with phosphorothioate linkage
  modified_base 3: mod_base = OTHER; note = 2'-O-methoxyethyl modified nucleotide with phosphorothioate linkage
  modified_base 4: mod_base = OTHER; note = 2'-O-methoxyethyl modified nucleotide with phosphorothioate linkage
  modified_base 5: mod_base = OTHER; note = 2'-O-methoxyethyl modified nucleotide with phosphorothioate linkage
  modified_base 6: mod_base = OTHER; note = 2'-O-methoxyethyl modified nucleotide with phosphorothioate linkage
  modified_base 7: mod_base = OTHER; note = 2'-O-methoxyethyl modified nucleotide with phosphorothioate linkage
  modified_base 8: mod_base = OTHER; note = 2'-O-methoxyethyl modified nucleotide with phosphorothioate linkage
  modified_base 9: mod_base = OTHER; note = 2'-O-methoxyethyl modified nucleotide with phosphorothioate linkage
  modified_base 10: mod_base = OTHER; note = 2'-O-methoxyethyl modified nucleotide with phosphorothioate linkage
  modified_base 11: mod_base = OTHER; note = 2'-O-methoxyethyl modified thymine with phosphorothioate linkage
  modified_base 12: mod_base = OTHER; note = 2'-O-methoxyethyl modified nucleotide with phosphorothioate linkage
  modified_base 13: mod_base = OTHER; note = 2'-O-methoxyethyl modified thymine with phosphorothioate linkage
  modified_base 14: mod_base = OTHER; note = 2'-O-methoxyethyl modified nucleotide with phosphorothioate linkage
  modified_base 15: mod_base = OTHER; note = 2'-O-methoxyethyl modified nucleotide with phosphorothioate linkage
  modified_base 16: mod_base = OTHER; note = 2'-O-methoxyethyl modified nucleotide with phosphorothioate linkage
  modified_base 17: mod_base = OTHER; note = 2'-O-methoxyethyl 5-methylcytosine with phosphorothioate linkage
  modified_base 18: mod_base = OTHER; note = 2'-O-methoxyethyl 5-methylcytosine
ccgaaagaagtatgaacc

SEQ ID NO: 332 - RNA, 18 nt, synthetic construct
  source 1..18: mol_type = other RNA
  modified_base 1: mod_base = OTHER; note = 2'-O-methoxyethyl 5-methylcytosine with phosphorothioate linkage
  modified_base 2: mod_base = OTHER; note = 2'-O-methoxyethyl 5-methylcytosine with phosphorothioate linkage
  modified_base 3: mod_base = OTHER; note = 2'-O-methoxyethyl modified nucleotide with phosphorothioate linkage
  modified_base 4: mod_base = OTHER; note = 2'-O-methoxyethyl modified nucleotide with phosphorothioate linkage
  modified_base 5: mod_base = OTHER; note = 2'-O-methoxyethyl modified nucleotide with phosphorothioate linkage
  modified_base 6: mod_base = OTHER; note = 2'-O-methoxyethyl modified nucleotide with phosphorothioate linkage
  modified_base 7: mod_base = OTHER; note = 2'-O-methoxyethyl modified nucleotide with phosphorothioate linkage
  modified_base 8: mod_base = OTHER; note = 2'-O-methoxyethyl modified nucleotide with phosphorothioate linkage
  modified_base 9: mod_base = OTHER; note = 2'-O-methoxyethyl modified nucleotide with phosphorothioate linkage
  modified_base 10: mod_base = OTHER; note = 2'-O-methoxyethyl modified nucleotide with phosphorothioate linkage
  modified_base 11: mod_base = OTHER; note = 2'-O-methoxyethyl modified thymine with phosphorothioate linkage
  modified_base 12: mod_base = OTHER; note = 2'-O-methoxyethyl modified nucleotide with phosphorothioate linkage
  modified_base 13: mod_base = OTHER; note = 2'-O-methoxyethyl modified thymine with phosphorothioate linkage
  modified_base 14: mod_base = OTHER; note = 2'-O-methoxyethyl modified nucleotide with phosphorothioate linkage
  modified_base 15: mod_base = OTHER; note = 2'-O-methoxyethyl modified nucleotide with phosphorothioate linkage
  modified_base 16: mod_base = OTHER; note = 2'-O-methoxyethyl modified nucleotide with phosphorothioate linkage
  modified_base 17: mod_base = OTHER; note = 2'-O-methoxyethyl 5-methylcytosine with phosphorothioate linkage
  modified_base 18: mod_base = OTHER; note = 2'-O-methoxyethyl 5-methylcytosine
ccgaaagaagtatgaacc

SEQ ID NO: 333 - RNA, 18 nt, synthetic construct
  source 1..18: mol_type = other RNA
  modified_base 1: mod_base = OTHER; note = 2'-O-methoxyethyl 5-methylcytosine with phosphorothioate linkage
  modified_base 2: mod_base = OTHER; note = 2'-O-methoxyethyl 5-methylcytosine with phosphorothioate linkage
  modified_base 3: mod_base = OTHER; note = 2'-O-methoxyethyl modified nucleotide with phosphorothioate linkage
  modified_base 4: mod_base = OTHER; note = 2'-O-methoxyethyl modified nucleotide with phosphorothioate linkage
  modified_base 5: mod_base = OTHER; note = 2'-O-methoxyethyl modified nucleotide with phosphorothioate linkage
  modified_base 6: mod_base = OTHER; note = 2'-O-methoxyethyl modified nucleotide with phosphorothioate linkage
  modified_base 7: mod_base = OTHER; note = 2'-O-methoxyethyl modified nucleotide with phosphorothioate linkage
  modified_base 8: mod_base = OTHER; note = 2'-O-methoxyethyl modified nucleotide with phosphorothioate linkage
  modified_base 9: mod_base = OTHER; note = 2'-O-methoxyethyl modified nucleotide with phosphorothioate linkage
  modified_base 10: mod_base = OTHER; note = 2'-O-methoxyethyl modified nucleotide with phosphorothioate linkage
  modified_base 11: mod_base = OTHER; note = 2'-O-methoxyethyl modified thymine with phosphorothioate linkage
  modified_base 12: mod_base = OTHER; note = 2'-O-methoxyethyl modified nucleotide with phosphorothioate linkage
  modified_base 13: mod_base = OTHER; note = 2'-O-methoxyethyl modified thymine with phosphorothioate linkage
  modified_base 14: mod_base = OTHER; note = 2'-O-methoxyethyl modified nucleotide with phosphorothioate linkage
  modified_base 15: mod_base = OTHER; note = 2'-O-methoxyethyl modified nucleotide with phosphorothioate linkage
  modified_base 16: mod_base = OTHER; note = 2'-O-methoxyethyl modified nucleotide with phosphorothioate linkage
  modified_base 17: mod_base = OTHER; note = 2'-O-methoxyethyl 5-methylcytosine with phosphorothioate linkage
  modified_base 18: mod_base = OTHER; note = 2'-O-methoxyethyl 5-methylcytosine
ccgaaagaagtatgaacc

SEQ ID NO: 334 - RNA, 18 nt, synthetic construct
  source 1..18: mol_type = other RNA
  modified_base 1: mod_base = OTHER; note = 2'-O-methoxyethyl 5-methylcytosine with phosphorothioate linkage
  modified_base 2: mod_base = OTHER; note = 2'-O-methoxyethyl 5-methylcytosine with phosphorothioate linkage
  modified_base 3: mod_base = OTHER; note = 2'-O-methoxyethyl modified nucleotide with phosphorothioate linkage
  modified_base 4: mod_base = OTHER; note = 2'-O-methoxyethyl modified nucleotide with phosphorothioate linkage
  modified_base 5: mod_base = OTHER; note = 2'-O-methoxyethyl modified nucleotide with phosphorothioate linkage
  modified_base 6: mod_base = OTHER; note = 2'-O-methoxyethyl modified nucleotide with phosphorothioate linkage
  modified_base 7: mod_base = OTHER; note = 2'-O-methoxyethyl modified nucleotide with phosphorothioate linkage
  modified_base 8: mod_base = OTHER; note = 2'-O-methoxyethyl modified nucleotide with phosphorothioate linkage
  modified_base 9: mod_base = OTHER; note = 2'-O-methoxyethyl modified nucleotide with phosphorothioate linkage
  modified_base 10: mod_base = OTHER; note = 2'-O-methoxyethyl modified nucleotide with phosphorothioate linkage
  modified_base 11: mod_base = OTHER; note = 2'-O-methoxyethyl modified thymine with phosphorothioate linkage
  modified_base 12: mod_base = OTHER; note = 2'-O-methoxyethyl modified nucleotide with phosphorothioate linkage
  modified_base 13: mod_base = OTHER; note = 2'-O-methoxyethyl modified thymine with phosphorothioate linkage
  modified_base 14: mod_base = OTHER; note = 2'-O-methoxyethyl modified nucleotide with phosphorothioate linkage
  modified_base 15: mod_base = OTHER; note = 2'-O-methoxyethyl modified nucleotide with phosphorothioate linkage
  modified_base 16: mod_base = OTHER; note = 2'-O-methoxyethyl modified nucleotide with phosphorothioate linkage
  modified_base 17: mod_base = OTHER; note = 2'-O-methoxyethyl 5-methylcytosine with phosphorothioate linkage
  modified_base 18: mod_base = OTHER; note = 2'-O-methoxyethyl 5-methylcytosine
ccgaaagaagtatgaacc

SEQ ID NO: 335 - RNA, 18 nt, synthetic construct
  source 1..18: mol_type = other RNA
  modified_base 1: mod_base = OTHER; note = 2'-O-methoxyethyl 5-methylcytosine with phosphorothioate linkage
  modified_base 2: mod_base = OTHER; note = 2'-O-methoxyethyl 5-methylcytosine with phosphorothioate linkage
  modified_base 3: mod_base = OTHER; note = 2'-O-methoxyethyl modified nucleotide with phosphorothioate linkage
  modified_base 4: mod_base = OTHER; note = 2'-O-methoxyethyl modified nucleotide with phosphorothioate linkage
  modified_base 5: mod_base = OTHER; note = 2'-O-methoxyethyl modified nucleotide with phosphorothioate linkage
  modified_base 6: mod_base = OTHER; note = 2'-O-methoxyethyl modified nucleotide with phosphorothioate linkage
  modified_base 7: mod_base = OTHER; note = 2'-O-methoxyethyl modified nucleotide with phosphorothioate linkage
  modified_base 8: mod_base = OTHER; note = 2'-O-methoxyethyl modified nucleotide with phosphorothioate linkage
  modified_base 9: mod_base = OTHER; note = 2'-O-methoxyethyl modified nucleotide with phosphorothioate linkage
  modified_base 10: mod_base = OTHER; note = 2'-O-methoxyethyl modified nucleotide with phosphorothioate linkage
  modified_base 11: mod_base = OTHER; note = 2'-O-methoxyethyl modified thymine with phosphorothioate linkage
  modified_base 12: mod_base = OTHER; note = 2'-O-methoxyethyl modified nucleotide with phosphorothioate linkage
  modified_base 13: mod_base = OTHER; note = 2'-O-methoxyethyl modified thymine with phosphorothioate linkage
  modified_base 14: mod_base = OTHER; note = 2'-O-methoxyethyl modified nucleotide with phosphorothioate linkage
  modified_base 15: mod_base = OTHER; note = 2'-O-methoxyethyl modified nucleotide with phosphorothioate linkage
  modified_base 16: mod_base = OTHER; note = 2'-O-methoxyethyl modified nucleotide with phosphorothioate linkage
  modified_base 17: mod_base = OTHER; note = 2'-O-methoxyethyl 5-methylcytosine with phosphorothioate linkage
  modified_base 18: mod_base = OTHER; note = 2'-O-methoxyethyl 5-methylcytosine
ccgaaagaagtatgaacc

SEQ ID NO: 336 - RNA, 18 nt, synthetic construct
  source 1..18: mol_type = other RNA
  modified_base 1: mod_base = OTHER; note = 2'-O-methoxyethyl 5-methylcytosine with phosphorothioate linkage
  modified_base 2: mod_base = OTHER; note = 2'-O-methoxyethyl 5-methylcytosine with phosphorothioate linkage
  modified_base 3: mod_base = OTHER; note = 2'-O-methoxyethyl modified nucleotide with phosphorothioate linkage
  modified_base 4: mod_base = OTHER; note = 2'-O-methoxyethyl modified nucleotide with phosphorothioate linkage
  modified_base 5: mod_base = OTHER; note = 2'-O-methoxyethyl modified nucleotide with phosphorothioate linkage
  modified_base 6: mod_base = OTHER; note = 2'-O-methoxyethyl modified nucleotide with phosphorothioate linkage
  modified_base 7: mod_base = OTHER; note = 2'-O-methoxyethyl modified nucleotide with phosphorothioate linkage
  modified_base 8: mod_base = OTHER; note = 2'-O-methoxyethyl modified nucleotide with phosphorothioate linkage
  modified_base 9: mod_base = OTHER; note = 2'-O-methoxyethyl modified nucleotide with phosphorothioate linkage
  modified_base 10: mod_base = OTHER; note = 2'-O-methoxyethyl modified nucleotide with phosphorothioate linkage
  modified_base 11: mod_base = OTHER; note = 2'-O-methoxyethyl modified thymine with phosphorothioate linkage
  modified_base 12: mod_base = OTHER; note = 2'-O-methoxyethyl modified nucleotide with phosphorothioate linkage
  modified_base 13: mod_base = OTHER; note = 2'-O-methoxyethyl modified thymine with phosphorothioate linkage
  modified_base 14: mod_base = OTHER; note = 2'-O-methoxyethyl modified nucleotide with phosphorothioate linkage
  modified_base 15: mod_base = OTHER; note = 2'-O-methoxyethyl modified nucleotide with phosphorothioate linkage
  modified_base 16: mod_base = OTHER; note = 2'-O-methoxyethyl modified nucleotide with phosphorothioate linkage
  modified_base 17: mod_base = OTHER; note = 2'-O-methoxyethyl 5-methylcytosine with phosphorothioate linkage
  modified_base 18: mod_base = OTHER; note = 2'-O-methoxyethyl 5-methylcytosine
ccgaaagaagtatgaacc

SEQ ID NO: 337 - RNA, 18 nt, synthetic construct
  source 1..18: mol_type = other RNA
  modified_base 1: mod_base = OTHER; note = 2'-O-methoxyethyl 5-methylcytosine with phosphorothioate linkage
  modified_base 2: mod_base = OTHER; note = 2'-O-methoxyethyl 5-methylcytosine with phosphorothioate linkage
  modified_base 3: mod_base = OTHER; note = 2'-O-methoxyethyl modified nucleotide with phosphorothioate linkage
  modified_base 4: mod_base = OTHER; note = 2'-O-methoxyethyl modified nucleotide with phosphorothioate linkage
  modified_base 5: mod_base = OTHER; note = 2'-O-methoxyethyl modified nucleotide with phosphorothioate linkage
  modified_base 6: mod_base = OTHER; note = 2'-O-methoxyethyl modified nucleotide with phosphorothioate linkage
  modified_base 7: mod_base = OTHER; note = 2'-O-methoxyethyl modified nucleotide with phosphorothioate linkage
  modified_base 8: mod_base = OTHER; note = 2'-O-methoxyethyl modified nucleotide with phosphorothioate linkage
  modified_base 9: mod_base = OTHER; note = 2'-O-methoxyethyl modified nucleotide with phosphorothioate linkage
  modified_base 10: mod_base = OTHER; note = 2'-O-methoxyethyl modified nucleotide with phosphorothioate linkage
  modified_base 11: mod_base = OTHER; note = 2'-O-methoxyethyl modified thymine with phosphorothioate linkage
  modified_base 12: mod_base = OTHER; note = 2'-O-methoxyethyl modified nucleotide with phosphorothioate linkage
  modified_base 13: mod_base = OTHER; note = 2'-O-methoxyethyl modified thymine with phosphorothioate linkage
  modified_base 14: mod_base = OTHER; note = 2'-O-methoxyethyl modified nucleotide with phosphorothioate linkage
  modified_base 15: mod_base = OTHER; note = 2'-O-methoxyethyl modified nucleotide with phosphorothioate linkage
  modified_base 16: mod_base = OTHER; note = 2'-O-methoxyethyl modified nucleotide with phosphorothioate linkage
  modified_base 17: mod_base = OTHER; note = 2'-O-methoxyethyl 5-methylcytosine with phosphorothioate linkage
  modified_base 18: mod_base = OTHER; note = 2'-O-methoxyethyl 5-methylcytosine
ccgaaagaagtatgaacc

SEQ ID NO: 338 - RNA, 18 nt, synthetic construct
  source 1..18: mol_type = other RNA
  modified_base 1: mod_base = OTHER; note = 2'-O-methoxyethyl 5-methylcytosine with phosphorothioate linkage
  modified_base 2: mod_base = OTHER; note = 2'-O-methoxyethyl 5-methylcytosine with phosphorothioate linkage
  modified_base 3: mod_base = OTHER; note = 2'-O-methoxyethyl modified nucleotide with phosphorothioate linkage
  modified_base 4: mod_base = OTHER; note = 2'-O-methoxyethyl modified nucleotide with phosphorothioate linkage
  modified_base 5: mod_base = OTHER; note = 2'-O-methoxyethyl modified nucleotide with phosphorothioate linkage
  modified_base 6: mod_base = OTHER; note = 2'-O-methoxyethyl modified nucleotide with phosphorothioate linkage
  modified_base 7: mod_base = OTHER; note = 2'-O-methoxyethyl modified nucleotide with phosphorothioate linkage
  modified_base 8: mod_base = OTHER; note = 2'-O-methoxyethyl modified nucleotide with phosphorothioate linkage
  modified_base 9: mod_base = OTHER; note = 2'-O-methoxyethyl modified nucleotide with phosphorothioate linkage
  modified_base 10: mod_base = OTHER; note = 2'-O-methoxyethyl modified nucleotide with phosphorothioate linkage
  modified_base 11: mod_base = OTHER; note = 2'-O-methoxyethyl modified thymine with phosphorothioate linkage
  modified_base 12: mod_base = OTHER; note = 2'-O-methoxyethyl modified nucleotide with phosphorothioate linkage
  modified_base 13: mod_base = OTHER; note = 2'-O-methoxyethyl modified thymine with phosphorothioate linkage
  modified_base 14: mod_base = OTHER; note = 2'-O-methoxyethyl modified nucleotide with phosphorothioate linkage
  modified_base 15: mod_base = OTHER; note = 2'-O-methoxyethyl modified nucleotide with phosphorothioate linkage
  modified_base 16: mod_base = OTHER; note = 2'-O-methoxyethyl modified nucleotide with phosphorothioate linkage
  modified_base 17: mod_base = OTHER; note = 2'-O-methoxyethyl 5-methylcytosine with phosphorothioate linkage
  modified_base 18: mod_base = OTHER; note = 2'-O-methoxyethyl 5-methylcytosine
ccgaaagaagtatgaacc

SEQ ID NO: 339 - RNA, 18 nt, synthetic construct
  source 1..18: mol_type = other RNA
  modified_base 1: mod_base = OTHER; note = 2'-O-methoxyethyl 5-methylcytosine with phosphorothioate linkage
  modified_base 2: mod_base = OTHER; note = 2'-O-methoxyethyl 5-methylcytosine with phosphorothioate linkage
  modified_base 3: mod_base = OTHER; note = 2'-O-methoxyethyl modified nucleotide with phosphorothioate linkage
  modified_base 4: mod_base = OTHER; note = 2'-O-methoxyethyl modified nucleotide
  modified_base 5: mod_base = OTHER; note = 2'-O-methoxyethyl modified nucleotide with phosphorothioate linkage
  modified_base 6: mod_base = OTHER; note = 2'-O-methoxyethyl modified nucleotide with phosphorothioate linkage
  modified_base 7: mod_base = OTHER; note = 2'-O-methoxyethyl modified nucleotide with phosphorothioate linkage
  modified_base 8: mod_base = OTHER; note = 2'-O-methoxyethyl modified nucleotide with phosphorothioate linkage
  modified_base 9: mod_base = OTHER; note = 2'-O-methoxyethyl modified nucleotide with phosphorothioate linkage
  modified_base 10: mod_base = OTHER; note = 2'-O-methoxyethyl modified nucleotide with phosphorothioate linkage
  modified_base 11: mod_base = OTHER; note = 2'-O-methoxyethyl modified thymine with phosphorothioate linkage
  modified_base 12: mod_base = OTHER; note = 2'-O-methoxyethyl modified nucleotide with phosphorothioate linkage
  modified_base 13: mod_base = OTHER; note = 2'-O-methoxyethyl modified thymine with phosphorothioate linkage
  modified_base 14: mod_base = OTHER; note = 2'-O-methoxyethyl modified nucleotide
  modified_base 15: mod_base = OTHER; note = 2'-O-methoxyethyl modified nucleotide with phosphorothioate linkage
  modified_base 16: mod_base = OTHER; note = 2'-O-methoxyethyl modified nucleotide with phosphorothioate linkage
  modified_base 17: mod_base = OTHER; note = 2'-O-methoxyethyl 5-methylcytosine with phosphorothioate linkage
  modified_base 18: mod_base = OTHER; note = 2'-O-methoxyethyl 5-methylcytosine
ccgaaagaagtatgaacc

SEQ ID NO: 340 - RNA, 18 nt, synthetic construct
  source 1..18: mol_type = other RNA
  modified_base 1: mod_base = OTHER; note = 2'-O-methoxyethyl 5-methylcytosine with phosphorothioate linkage
  modified_base 2: mod_base = OTHER; note = 2'-O-methoxyethyl 5-methylcytosine with phosphorothioate linkage
  modified_base 3: mod_base = OTHER; note = 2'-O-methoxyethyl modified nucleotide with phosphorothioate linkage
  modified_base 4: mod_base = OTHER; note = 2'-O-methoxyethyl modified nucleotide
  modified_base 5: mod_base = OTHER; note = 2'-O-methoxyethyl modified nucleotide with phosphorothioate linkage
  modified_base 6: mod_base = OTHER; note = 2'-O-methoxyethyl modified nucleotide with phosphorothioate linkage
  modified_base 7: mod_base = OTHER; note = 2'-O-methoxyethyl modified nucleotide with phosphorothioate linkage
  modified_base 8: mod_base = OTHER; note = 2'-O-methoxyethyl modified nucleotide with phosphorothioate linkage
  modified_base 9: mod_base = OTHER; note = 2'-O-methoxyethyl modified nucleotide with phosphorothioate linkage
  modified_base 10: mod_base = OTHER; note = 2'-O-methoxyethyl modified nucleotide with phosphorothioate linkage
  modified_base 11: mod_base = OTHER; note = 2'-O-methoxyethyl modified thymine with phosphorothioate linkage
  modified_base 12: mod_base = OTHER; note = 2'-O-methoxyethyl modified nucleotide with phosphorothioate linkage
  modified_base 13: mod_base = OTHER; note = 2'-O-methoxyethyl modified thymine with phosphorothioate linkage
  modified_base 14: mod_base = OTHER; note = 2'-O-methoxyethyl modified nucleotide
  modified_base 15: mod_base = OTHER; note = 2'-O-methoxyethyl modified nucleotide with phosphorothioate linkage
  modified_base 16: mod_base = OTHER; note = 2'-O-methoxyethyl modified nucleotide with phosphorothioate linkage
  modified_base 17: mod_base = OTHER; note = 2'-O-methoxyethyl 5-methylcytosine with phosphorothioate linkage
  modified_base 18: mod_base = OTHER; note = 2'-O-methoxyethyl 5-methylcytosine
ccgaaagaagtatgaacc

SEQ ID NO: 341 - RNA, 18 nt, synthetic construct
  source 1..18: mol_type = other RNA
  modified_base 1: mod_base = OTHER; note = 2'-O-methoxyethyl 5-methylcytosine with phosphorothioate linkage
  modified_base 2: mod_base = OTHER; note = 2'-O-methoxyethyl 5-methylcytosine
  modified_base 3: mod_base = OTHER; note = 2'-O-methoxyethyl modified nucleotide with phosphorothioate linkage
  modified_base 4: mod_base = OTHER; note = 2'-O-methoxyethyl modified nucleotide with phosphorothioate linkage
  modified_base 5: mod_base = OTHER; note = 2'-O-methoxyethyl modified nucleotide with phosphorothioate linkage
  modified_base 6: mod_base = OTHER; note = 2'-O-methoxyethyl modified nucleotide with phosphorothioate linkage
  modified_base 7: mod_base = OTHER; note = 2'-O-methoxyethyl modified nucleotide with phosphorothioate linkage
  modified_base 8: mod_base = OTHER; note = 2'-O-methoxyethyl modified nucleotide with phosphorothioate linkage
  modified_base 9: mod_base = OTHER; note = 2'-O-methoxyethyl modified nucleotide with phosphorothioate linkage
  modified_base 10: mod_base = OTHER; note = 2'-O-methoxyethyl modified nucleotide with phosphorothioate linkage
  modified_base 11: mod_base = OTHER; note = 2'-O-methoxyethyl modified thymine with phosphorothioate linkage
  modified_base 12: mod_base = OTHER; note = 2'-O-methoxyethyl modified nucleotide with phosphorothioate linkage
  modified_base 13: mod_base = OTHER; note = 2'-O-methoxyethyl modified thymine with phosphorothioate linkage
  modified_base 14: mod_base = OTHER; note = 2'-O-methoxyethyl modified nucleotide
  modified_base 15: mod_base = OTHER; note = 2'-O-methoxyethyl modified nucleotide with phosphorothioate linkage
  modified_base 16: mod_base = OTHER; note = 2'-O-methoxyethyl modified nucleotide with phosphorothioate linkage
  modified_base 17: mod_base = OTHER; note = 2'-O-methoxyethyl 5-methylcytosine with phosphorothioate linkage
  modified_base 18: mod_base = OTHER; note = 2'-O-methoxyethyl 5-methylcytosine
ccgaaagaagtatgaacc

SEQ ID NO: 342 - RNA, 18 nt, synthetic construct
  source 1..18: mol_type = other RNA
  modified_base 1: mod_base = OTHER; note = 2'-O-methoxyethyl 5-methylcytosine with phosphorothioate linkage
  modified_base 2: mod_base = OTHER; note = 2'-O-methoxyethyl 5-methylcytosine with phosphorothioate linkage
  modified_base 3: mod_base = OTHER; note = 2'-O-methoxyethyl modified nucleotide with phosphorothioate linkage
  modified_base 4: mod_base = OTHER; note = 2'-O-methoxyethyl modified nucleotide
  modified_base 5: mod_base = OTHER; note = 2'-O-methoxyethyl modified nucleotide with phosphorothioate linkage
  modified_base 6: mod_base = OTHER; note = 2'-O-methoxyethyl modified nucleotide with phosphorothioate linkage
  modified_base 7: mod_base = OTHER; note = 2'-O-methoxyethyl modified nucleotide with phosphorothioate linkage
  modified_base 8: mod_base = OTHER; note = 2'-O-methoxyethyl modified nucleotide
  modified_base 9: mod_base = OTHER; note = 2'-O-methoxyethyl modified nucleotide with phosphorothioate linkage
  modified_base 10: mod_base = OTHER; note = 2'-O-methoxyethyl modified nucleotide with phosphorothioate linkage
  modified_base 11: mod_base = OTHER; note = 2'-O-methoxyethyl modified thymine with phosphorothioate linkage
  modified_base 12: mod_base = OTHER; note = 2'-O-methoxyethyl modified nucleotide with phosphorothioate linkage
  modified_base 13: mod_base = OTHER; note = 2'-O-methoxyethyl modified thymine with phosphorothioate linkage
  modified_base 14: mod_base = OTHER; note = 2'-O-methoxyethyl modified nucleotide with phosphorothioate linkage
  modified_base 15: mod_base = OTHER; note = 2'-O-methoxyethyl modified nucleotide with phosphorothioate linkage
  modified_base 16: mod_base = OTHER; note = 2'-O-methoxyethyl modified nucleotide with phosphorothioate linkage
  modified_base 17: mod_base = OTHER; note = 2'-O-methoxyethyl 5-methylcytosine with phosphorothioate linkage
  modified_base 18: mod_base = OTHER; note = 2'-O-methoxyethyl 5-methylcytosine
ccgaaagaagtatgaacc

SEQ ID NO: 343 - RNA, 18 nt, synthetic construct
  source 1..18: mol_type = other RNA
  modified_base 1: mod_base = OTHER; note = 2'-O-methoxyethyl 5-methylcytosine with phosphorothioate linkage
  modified_base 2: mod_base = OTHER; note = 2'-O-methoxyethyl 5-methylcytosine with phosphorothioate linkage
  modified_base 3: mod_base = OTHER; note = 2'-O-methoxyethyl modified nucleotide with phosphorothioate linkage
  modified_base 4: mod_base = OTHER; note = 2'-O-methoxyethyl modified nucleotide
  modified_base 5: mod_base = OTHER; note = 2'-O-methoxyethyl modified nucleotide with phosphorothioate linkage
  modified_base 6: mod_base = OTHER; note = 2'-O-methoxyethyl modified nucleotide with phosphorothioate linkage
  modified_base 7: mod_base = OTHER; note = 2'-O-methoxyethyl modified nucleotide with phosphorothioate linkage
  modified_base 8: mod_base = OTHER; note = 2'-O-methoxyethyl modified nucleotide
  modified_base 9: mod_base = OTHER; note = 2'-O-methoxyethyl modified nucleotide with phosphorothioate linkage
  modified_base 10: mod_base = OTHER; note = 2'-O-methoxyethyl modified nucleotide with phosphorothioate linkage
  modified_base 11: mod_base = OTHER; note = 2'-O-methoxyethyl modified thymine with phosphorothioate linkage
  modified_base 12: mod_base = OTHER; note = 2'-O-methoxyethyl modified nucleotide with phosphorothioate linkage
  modified_base 13: mod_base = OTHER; note = 2'-O-methoxyethyl modified thymine with phosphorothioate linkage
  modified_base 14: mod_base = OTHER; note = 2'-O-methoxyethyl modified nucleotide with phosphorothioate linkage
  modified_base 15: mod_base = OTHER; note = 2'-O-methoxyethyl modified nucleotide with phosphorothioate linkage
  modified_base 16: mod_base = OTHER; note = 2'-O-methoxyethyl modified nucleotide with phosphorothioate linkage
  modified_base 17: mod_base = OTHER; note = 2'-O-methoxyethyl 5-methylcytosine with phosphorothioate linkage
  modified_base 18: mod_base = OTHER; note = 2'-O-methoxyethyl 5-methylcytosine
ccgaaagaagtatgaacc

SEQ ID NO: 344 - RNA, 18 nt, synthetic construct
  source 1..18: mol_type = other RNA
  modified_base 1: mod_base = OTHER; note = 2'-O-methoxyethyl 5-methylcytosine with phosphorothioate linkage
  modified_base 2: mod_base = OTHER; note = 2'-O-methoxyethyl 5-methylcytosine with phosphorothioate linkage
  modified_base 3: mod_base = OTHER; note = 2'-O-methoxyethyl modified nucleotide
  modified_base 4: mod_base = OTHER; note = 2'-O-methoxyethyl modified nucleotide
  modified_base 5: mod_base = OTHER; note = 2'-O-methoxyethyl modified nucleotide
  modified_base 6: mod_base = OTHER; note = 2'-O-methoxyethyl modified nucleotide with phosphorothioate linkage
  modified_base 7: mod_base = OTHER; note = 2'-O-methoxyethyl modified nucleotide with phosphorothioate linkage
  modified_base 8: mod_base = OTHER; note = 2'-O-methoxyethyl modified nucleotide with phosphorothioate linkage
  modified_base 9: mod_base = OTHER; note = 2'-O-methoxyethyl modified nucleotide with phosphorothioate linkage
  modified_base 10: mod_base = OTHER; note = 2'-O-methoxyethyl modified nucleotide with phosphorothioate linkage
  modified_base 11: mod_base = OTHER; note = 2'-O-methoxyethyl modified thymine with phosphorothioate linkage
  modified_base 12: mod_base = OTHER; note = 2'-O-methoxyethyl modified nucleotide with phosphorothioate linkage
  modified_base 13: mod_base = OTHER; note = 2'-O-methoxyethyl modified thymine with phosphorothioate linkage
  modified_base 14: mod_base = OTHER; note = 2'-O-methoxyethyl modified nucleotide with phosphorothioate linkage
  modified_base 15: mod_base = OTHER; note = 2'-O-methoxyethyl modified nucleotide with phosphorothioate linkage
  modified_base 16: mod_base = OTHER; note = 2'-O-methoxyethyl modified nucleotide with phosphorothioate linkage
  modified_base 17: mod_base = OTHER; note = 2'-O-methoxyethyl 5-methylcytosine with phosphorothioate linkage
  modified_base 18: mod_base = OTHER; note = 2'-O-methoxyethyl 5-methylcytosine
ccgaaagaagtatgaacc

SEQ ID NO: 345 - RNA, 18 nt, synthetic construct
  source 1..18: mol_type = other RNA
  modified_base 1: mod_base = OTHER; note = 2'-O-methoxyethyl 5-methylcytosine
  modified_base 2: mod_base = OTHER; note = 2'-O-methoxyethyl 5-methylcytosine
  modified_base 3: mod_base = OTHER; note = 2'-O-methoxyethyl modified nucleotide
  modified_base 4: mod_base = OTHER; note = 2'-O-methoxyethyl modified nucleotide
  modified_base 5: mod_base = OTHER; note = 2'-O-methoxyethyl modified nucleotide
  modified_base 6: mod_base = OTHER; note = 2'-O-methoxyethyl modified nucleotide with phosphorothioate linkage
  modified_base 7: mod_base = OTHER; note = 2'-O-methoxyethyl modified nucleotide with phosphorothioate linkage
  modified_base 8: mod_base = OTHER; note = 2'-O-methoxyethyl modified nucleotide with phosphorothioate linkage
  modified_base 9: mod_base = OTHER; note = 2'-O-methoxyethyl modified nucleotide with phosphorothioate linkage
  modified_base 10: mod_base = OTHER; note = 2'-O-methoxyethyl modified nucleotide with phosphorothioate linkage
  modified_base 11: mod_base = OTHER; note = 2'-O-methoxyethyl modified thymine with phosphorothioate linkage
  modified_base 12: mod_base = OTHER; note = 2'-O-methoxyethyl modified nucleotide with phosphorothioate linkage
  modified_base 13: mod_base = OTHER; note = 2'-O-methoxyethyl modified thymine with phosphorothioate linkage
  modified_base 14: mod_base = OTHER; note = 2'-O-methoxyethyl modified nucleotide with phosphorothioate linkage
  modified_base 15: mod_base = OTHER; note = 2'-O-methoxyethyl modified nucleotide with phosphorothioate linkage
  modified_base 16: mod_base = OTHER; note = 2'-O-methoxyethyl modified nucleotide with phosphorothioate linkage
  modified_base 17: mod_base = OTHER; note = 2'-O-methoxyethyl 5-methylcytosine with phosphorothioate linkage
  modified_base 18: mod_base = OTHER; note = 2'-O-methoxyethyl 5-methylcytosine
ccgaaagaagtatgaacc

SEQ ID NO: 346 - RNA, 18 nt, synthetic construct
  source 1..18: mol_type = other RNA
  modified_base 1: mod_base = OTHER; note = 2'-O-methoxyethyl 5-methylcytosine with phosphorothioate linkage
  modified_base 2: mod_base = OTHER; note = 2'-O-methoxyethyl 5-methylcytosine with phosphorothioate linkage
  modified_base 3: mod_base = OTHER; note = 2'-O-methoxyethyl modified nucleotide
  modified_base 4: mod_base = OTHER; note = 2'-O-methoxyethyl modified nucleotide with phosphorothioate linkage
  modified_base 5: mod_base = OTHER; note = 2'-O-methoxyethyl modified nucleotide with phosphorothioate linkage
  modified_base 6: mod_base = OTHER; note = 2'-O-methoxyethyl modified nucleotide with phosphorothioate linkage
  modified_base 7: mod_base = OTHER; note = 2'-O-methoxyethyl modified nucleotide
  modified_base 8: mod_base = OTHER; note = 2'-O-methoxyethyl modified nucleotide with phosphorothioate linkage
  modified_base 9: mod_base = OTHER; note = 2'-O-methoxyethyl modified nucleotide with phosphorothioate linkage
  modified_base 10: mod_base = OTHER; note = 2'-O-methoxyethyl modified nucleotide
  modified_base 11: mod_base = OTHER; note = 2'-O-methoxyethyl modified thymine with phosphorothioate linkage
  modified_base 12: mod_base = OTHER; note = 2'-O-methoxyethyl modified nucleotide with phosphorothioate linkage
  modified_base 13: mod_base = OTHER; note = 2'-O-methoxyethyl modified thymine with phosphorothioate linkage
  modified_base 14: mod_base = OTHER; note = 2'-O-methoxyethyl modified nucleotide
  modified_base 15: mod_base = OTHER; note = 2'-O-methoxyethyl modified nucleotide with phosphorothioate linkage
  modified_base 16: mod_base = OTHER; note = 2'-O-methoxyethyl modified nucleotide with phosphorothioate linkage
  modified_base 17: mod_base = OTHER; note = 2'-O-methoxyethyl 5-methylcytosine with phosphorothioate linkage
  modified_base 18: mod_base = OTHER; note = 2'-O-methoxyethyl 5-methylcytosine
ccgaaagaagtatgaacc

SEQ ID NO: 347 - RNA, 18 nt, synthetic construct
  source 1..18: mol_type = other RNA
  modified_base 1: mod_base = OTHER; note = 2'-O-methoxyethyl 5-methylcytosine with phosphorothioate linkage
  modified_base 2: mod_base = OTHER; note = 2'-O-methoxyethyl 5-methylcytosine
  modified_base 3: mod_base = OTHER; note = 2'-O-methoxyethyl modified nucleotide with phosphorothioate linkage
  modified_base 4: mod_base = OTHER; note = 2'-O-methoxyethyl modified nucleotide with phosphorothioate linkage
  modified_base 5: mod_base = OTHER; note = 2'-O-methoxyethyl modified nucleotide with phosphorothioate linkage
  modified_base 6: mod_base = OTHER; note = 2'-O-methoxyethyl modified nucleotide with phosphorothioate linkage
  modified_base 7: mod_base = OTHER; note = 2'-O-methoxyethyl modified nucleotide
  modified_base 8: mod_base = OTHER; note = 2'-O-methoxyethyl modified nucleotide with phosphorothioate linkage
  modified_base 9: mod_base = OTHER; note = 2'-O-methoxyethyl modified nucleotide with phosphorothioate linkage
  modified_base 10: mod_base = OTHER; note = 2'-O-methoxyethyl modified nucleotide with phosphorothioate linkage
  modified_base 11: mod_base = OTHER; note = 2'-O-methoxyethyl modified thymine with phosphorothioate linkage
  modified_base 12: mod_base = OTHER; note = 2'-O-methoxyethyl modified nucleotide with phosphorothioate linkage
  modified_base 13: mod_base = OTHER; note = 2'-O-methoxyethyl modified thymine with phosphorothioate linkage
  modified_base 14: mod_base = OTHER; note = 2'-O-methoxyethyl modified nucleotide
  modified_base 15: mod_base = OTHER; note = 2'-O-methoxyethyl modified nucleotide with phosphorothioate linkage
  modified_base 16: mod_base = OTHER; note = 2'-O-methoxyethyl modified nucleotide with phosphorothioate linkage
  modified_base 17: mod_base = OTHER; note = 2'-O-methoxyethyl 5-methylcytosine with phosphorothioate linkage
  modified_base 18: mod_base = OTHER; note = 2'-O-methoxyethyl 5-methylcytosine
ccgaaagaagtatgaacc

SEQ ID NO: 348 - RNA, 18 nt, synthetic construct
  source 1..18: mol_type = other RNA
  modified_base 1: mod_base = OTHER; note = 2'-O-methoxyethyl 5-methylcytosine with phosphorothioate linkage
  modified_base 2: mod_base = OTHER; note = 2'-O-methoxyethyl 5-methylcytosine with phosphorothioate linkage
  modified_base 3: mod_base = OTHER; note = 2'-O-methoxyethyl modified nucleotide
  modified_base 4: mod_base = OTHER; note = 2'-O-methoxyethyl modified nucleotide with phosphorothioate linkage
  modified_base 5: mod_base = OTHER; note = 2'-O-methoxyethyl modified nucleotide with phosphorothioate linkage
  modified_base 6: mod_base = OTHER; note = 2'-O-methoxyethyl modified nucleotide with phosphorothioate linkage
  modified_base 7: mod_base = OTHER; note = 2'-O-methoxyethyl modified nucleotide with phosphorothioate linkage
  modified_base 8: mod_base = OTHER; note = 2'-O-methoxyethyl modified nucleotide with phosphorothioate linkage
  modified_base 9: mod_base = OTHER; note = 2'-O-methoxyethyl modified nucleotide with phosphorothioate linkage
  modified_base 10: mod_base = OTHER; note = 2'-O-methoxyethyl modified nucleotide with phosphorothioate linkage
  modified_base 11: mod_base = OTHER; note = 2'-O-methoxyethyl modified thymine with phosphorothioate linkage
  modified_base 12: mod_base = OTHER; note = 2'-O-methoxyethyl modified nucleotide with phosphorothioate linkage
  modified_base 13: mod_base = OTHER; note = 2'-O-methoxyethyl modified thymine with phosphorothioate linkage
  modified_base 14: mod_base = OTHER; note = 2'-O-methoxyethyl modified nucleotide
  modified_base 15: mod_base = OTHER; note = 2'-O-methoxyethyl modified nucleotide with phosphorothioate linkage
  modified_base 16: mod_base = OTHER; note = 2'-O-methoxyethyl modified nucleotide with phosphorothioate linkage
  modified_base 17: mod_base = OTHER; note = 2'-O-methoxyethyl 5-methylcytosine with phosphorothioate linkage
  modified_base 18: mod_base = OTHER; note = 2'-O-methoxyethyl 5-methylcytosine
ccgaaagaagtatgaacc

SEQ ID NO: 349 - RNA, 18 nt, synthetic construct
  source 1..18: mol_type = other RNA
  modified_base 1: mod_base = OTHER; note = 2'-O-methoxyethyl 5-methylcytosine with phosphorothioate linkage
  modified_base 2: mod_base = OTHER; note = 2'-O-methoxyethyl 5-methylcytosine with phosphorothioate linkage
  modified_base 3: mod_base = OTHER; note = 2'-O-methoxyethyl modified nucleotide
  modified_base 4: mod_base = OTHER; note = 2'-O-methoxyethyl modified nucleotide with phosphorothioate linkage
  modified_base 5: mod_base = OTHER; note = 2'-O-methoxyethyl modified nucleotide with phosphorothioate linkage
  modified_base 6: mod_base = OTHER; note = 2'-O-methoxyethyl modified nucleotide with phosphorothioate linkage
  modified_base 7: mod_base = OTHER; note = 2'-O-methoxyethyl modified nucleotide with phosphorothioate linkage
  modified_base 8: mod_base = OTHER; note = 2'-O-methoxyethyl modified nucleotide with phosphorothioate linkage
  modified_base 9: mod_base = OTHER; note = 2'-O-methoxyethyl modified nucleotide with phosphorothioate linkage
  modified_base 10: mod_base = OTHER; note = 2'-O-methoxyethyl modified nucleotide with phosphorothioate linkage
  modified_base 11: mod_base = OTHER; note = 2'-O-methoxyethyl modified thymine with phosphorothioate linkage
  modified_base 12: mod_base = OTHER; note = 2'-O-methoxyethyl modified nucleotide with phosphorothioate linkage
  modified_base 13: mod_base = OTHER; note = 2'-O-methoxyethyl modified thymine with phosphorothioate linkage
  modified_base 14: mod_base = OTHER; note = 2'-O-methoxyethyl modified nucleotide
  modified_base 15: mod_base = OTHER; note = 2'-O-methoxyethyl modified nucleotide with phosphorothioate linkage
  modified_base 16: mod_base = OTHER; note = 2'-O-methoxyethyl modified nucleotide with phosphorothioate linkage
  modified_base 17: mod_base = OTHER; note = 2'-O-methoxyethyl 5-methylcytosine with phosphorothioate linkage
  modified_base 18: mod_base = OTHER; note = 2'-O-methoxyethyl 5-methylcytosine
ccgaaagaagtatgaacc

SEQ ID NO: 350 - RNA, 18 nt, synthetic construct
  source 1..18: mol_type = other RNA
  modified_base 1: mod_base = OTHER; note = 2'-O-methoxyethyl 5-methylcytosine with phosphorothioate linkage
  modified_base 2: mod_base = OTHER; note = 2'-O-methoxyethyl 5-methylcytosine with phosphorothioate linkage
  modified_base 3: mod_base = OTHER; note = 2'-O-methoxyethyl modified nucleotide with phosphorothioate linkage
  modified_base 4: mod_base = OTHER; note = 2'-O-methoxyethyl modified nucleotide with phosphorothioate linkage
  modified_base 5: mod_base = OTHER; note = 2'-O-methoxyethyl modified nucleotide
  modified_base 6: mod_base = OTHER; note = 2'-O-methoxyethyl modified nucleotide with phosphorothioate linkage
  modified_base 7: mod_base = OTHER; note = 2'-O-methoxyethyl modified nucleotide with phosphorothioate linkage
  modified_base 8: mod_base = OTHER; note = 2'-O-methoxyethyl modified nucleotide with phosphorothioate linkage
  modified_base 9: mod_base = OTHER; note = 2'-O-methoxyethyl modified nucleotide with phosphorothioate linkage
  modified_base 10: mod_base = OTHER; note = 2'-O-methoxyethyl modified nucleotide with phosphorothioate linkage
  modified_base 11: mod_base = OTHER; note = 2'-O-methoxyethyl modified thymine with phosphorothioate linkage
  modified_base 12: mod_base = OTHER; note = 2'-O-methoxyethyl modified nucleotide with phosphorothioate linkage
  modified_base 13: mod_base = OTHER; note = 2'-O-methoxyethyl modified thymine with phosphorothioate linkage
  modified_base 14: mod_base = OTHER; note = 2'-O-methoxyethyl modified nucleotide
  modified_base 15: mod_base = OTHER; note = 2'-O-methoxyethyl modified nucleotide with phosphorothioate linkage
  modified_base 16: mod_base = OTHER; note = 2'-O-methoxyethyl modified nucleotide with phosphorothioate linkage
  modified_base 17: mod_base = OTHER; note = 2'-O-methoxyethyl 5-methylcytosine with phosphorothioate linkage
  modified_base 18: mod_base = OTHER; note = 2'-O-methoxyethyl 5-methylcytosine
ccgaaagaagtatgaacc

SEQ ID NO: 351 - protein, 7 aa, synthetic construct
  SITE 1: note = D-amino acid
  SITE 2: note = 2-Naphthylalanine
  SITE 4: note = D-amino acid
  SITE 6: note = D-amino acid
  SITE 7: note = 5-Aminopentanoic acid with a 2x polyethylene glycol linker attached to side chain of Glutamine
FXRRRRQ

SEQ ID NO: 352 - protein, 7 aa, synthetic construct
  SITE 1: note = D-amino acid
  SITE 2: note = 2-Naphthylalanine
  SITE 4: note = D-amino acid
  SITE 6: note = D-amino acid
  SITE 7: note = Lysine with a 2x polyethylene glycol linker attached to side chain of Glutamine
FXRRRRQ

SEQ ID NO: 353 - protein, 7 aa, synthetic construct
  SITE 1: note = D-amino acid
  SITE 2: note = 2-Naphthylalanine
  SITE 4: note = D-amino acid
  SITE 6: note = D-amino acid
  SITE 7: note = 5-Aminopentanoic acid with a 2x polyethylene glycol linker attached to side chain of Glutamine
KXRRRRQ

SEQ ID NO: 354 - protein, 7 aa, synthetic construct
  SITE 1: note = D-amino acid
  SITE 2: note = 2-Naphthylalanine
  SITE 4: note = D-amino acid
  SITE 6: note = D-amino acid
  SITE 7: note = 5-Aminopentanoic acid with a 2x polyethylene glycol linker attached to side chain of Glutamine
FXRRRKQ

SEQ ID NO: 355 - protein, 7 aa, synthetic construct
  SITE 1: note = D-amino acid
  SITE 2: note = 2-Naphthylalanine
  SITE 4: note = D-amino acid
  SITE 6: note = D-amino acid
  SITE 7: note = Lysine functionalized with (S)-lipoic acid at epsilon-N position via amide bond with a 2x polyethylene glycol linker attached to side chain of Glutamine
FXRRRRQ

SEQ ID NO: 356 - protein, 7 aa, synthetic construct
  SITE 1: note = D-Lysine functionalized with (S)-lipoic acid at epsilon-N position via amide bond
  SITE 2: note = 2-Naphthylalanine
  SITE 4: note = D-amino acid
  SITE 6: note = D-amino acid
  SITE 7: note = 5-Aminopentanoic acid with a 2x polyethylene glycol linker attached to side chain of Glutamine
KXRRRRQ

SEQ ID NO: 357 - protein, 7 aa, synthetic construct
  SITE 1: note = D-amino acid
  SITE 2: note = 2-Naphthylalanine
  SITE 4: note = D-amino acid
  SITE 6: note = D-Lysine functionalized with (S)-lipoic acid at epsilon-N position via amide bond
  SITE 7: note = 5-Aminopentanoic acid with a 2x polyethylene glycol linker attached to side chain of Glutamine
FXRRRKQ

SEQ ID NO: 358 - protein, 7 aa, synthetic construct
  SITE 1: note = D-amino acid
  SITE 2: note = 2-Naphthylalanine
  SITE 4: note = D-amino acid
  SITE 6: note = D-amino acid
  SITE 7: note = Lysine with a 2x polyethylene glycol linker attached to side chain of Glutamine
FXRRRRQ

SEQ ID NO: 359 - protein, 7 aa, synthetic construct
  SITE 1: note = D-amino acid
  SITE 2: note = 2-Naphthylalanine
  SITE 4: note = D-amino acid
  SITE 6: note = D-amino acid
  SITE 7: note = 5-Aminopentanoic acid with a 2x polyethylene glycol linker attached to side chain of Glutamine
KXRRRRQ

SEQ ID NO: 360 - protein, 7 aa, synthetic construct
  SITE 1: note = D-amino acid
  SITE 2: note = 2-Naphthylalanine
  SITE 4: note = D-amino acid
  SITE 6: note = D-amino acid
  SITE 7: note = 5-Aminopentanoic acid with a 2x polyethylene glycol linker attached to side chain of Glutamine
FXRRRKQ

SEQ ID NO: 361 - protein, 7 aa, synthetic construct
  SITE 1: note = D-amino acid
  SITE 2: note = 2-Naphthylalanine
  SITE 4: note = D-amino acid
  SITE 6: note = D-amino acid
  SITE 7: note = Lysine functionalized with (S)-lipoic acid at epsilon-N position via amide bond with a 2x polyethylene glycol linker attached to side chain of Glutamine
FXRRRRQ

SEQ ID NO: 362 - protein, 7 aa, synthetic construct
  SITE 1: note = D-Lysine functionalized with (S)-lipoic acid at epsilon-N position via amide bond
  SITE 2: note = 2-Naphthylalanine
  SITE 4: note = D-amino acid
  SITE 6: note = D-amino acid
  SITE 7: note = 5-Aminopentanoic acid with a 2x polyethylene glycol linker attached to side chain of Glutamine
KXRRRRQ

SEQ ID NO: 363 - protein, 7 aa, synthetic construct
  SITE 1: note = D-amino acid
  SITE 2: note = 2-Naphthylalanine
  SITE 4: note = D-amino acid
  SITE 6: note = D-Lysine functionalized with (S)-lipoic acid at epsilon-N position via amide bond
  SITE 7: note = 5-Aminopentanoic acid with a 2x polyethylene glycol linker attached to side chain of Glutamine
FXRRRKQ

SEQ ID NO: 364 - protein, 6 aa, synthetic construct
  VARIANT 1: note = Any non standard lactam amino acid
  SITE 3: note = D-amino acid
  SITE 5: note = D-amino acid
XRRRRQ

SEQ ID NO: 365 - protein, 6 aa, synthetic construct
  SITE 1: note = D-amino acid
  VARIANT 2: note = Any non standard lactam amino acid
  SITE 3: note = D-amino acid
  SITE 5: note = D-amino acid
FXRRRQ

SEQ ID NO: 366 - protein, 6 aa, synthetic construct
  SITE 1: note = D-amino acid
  SITE 2: note = 2-Naphthylalanine
  VARIANT 3: note = Any non standard lactam amino acid
  SITE 5: note = D-amino acid
FXXRRQ

SEQ ID NO: 367 - protein, 6 aa, synthetic construct
  SITE 1: note = D-amino acid
  SITE 2: note = 2-Naphthylalanine
  VARIANT 4: note = Any non standard lactam amino acid
  SITE 5: note = D-amino acid
FXRXRQ

SEQ ID NO: 368 - protein, 6 aa, synthetic construct
  SITE 1: note = D-amino acid
  SITE 2: note = 2-Naphthylalanine
  SITE 4: note = D-amino acid
  VARIANT 5: note = Any non standard lactam amino acid
FXRRXQ

SEQ ID NO: 369 - protein, 7 aa, synthetic construct
  SITE 1: note = D-amino acid
  SITE 2: note = 2-Naphthylalanine
  SITE 3: note = 3-(2-guanidinoethyl)pyrrolidine-2-carboxylic acid
  SITE 4: note = D-amino acid
  SITE 6: note = D-amino acid
FXXRRRQ

SEQ ID NO: 370 - protein, 7 aa, synthetic construct
  SITE 1: note = D-amino acid
  SITE 2: note = 2-Naphthylalanine
  SITE 4: note = 3-(2-guanidinoethyl)pyrrolidine-2-carboxylic acid
  SITE 6: note = D-amino acid
FXRXRRQ

SEQ ID NO: 371 - protein, 7 aa, synthetic construct
  SITE 1: note = D-amino acid
  SITE 2: note = 2-Naphthylalanine
  SITE 4: note = D-amino acid
  SITE 5: note = 3-(2-guanidinoethyl)pyrrolidine-2-carboxylic acid
  SITE 6: note = D-amino acid
FXRRXRQ

SEQ ID NO: 372 - protein, 7 aa, synthetic construct
  SITE 1: note = D-amino acid
  SITE 2: note = 2-Naphthylalanine
  SITE 4: note = D-amino acid
  SITE 6: note = 3-(2-guanidinoethyl)pyrrolidine-2-carboxylic acid
FXRRRXQ

SEQ ID NO: 373 - protein, 7 aa, synthetic construct
  SITE 1: note = 3-benzylpyrrolidine-2-carboxylic acid
  SITE 2: note = 2-Naphthylalanine
  SITE 4: note = D-amino acid
  SITE 6: note = D-amino acid
XXRRRRQ

SEQ ID NO: 374 - protein, 7 aa, synthetic construct
  SITE 1: note = D-amino acid
  SITE 2: note = 3-(naphthalen-2-ylmethyl)pyrrolidine-2-carboxylic acid
  SITE 4: note = D-amino acid
  SITE 6: note = D-amino acid
FXRRRRQ

SEQ ID NO: 375 - protein, 7 aa, synthetic construct
  SITE 1: note = D-Phenylalanine linked via oxadiazole
  SITE 4: note = D-amino acid
  SITE 6: note = D-amino acid
FPRRRRQ

SEQ ID NO: 376 - DNA, 10 bp, synthetic construct
  source 1..10: mol_type = other DNA
  modified_base 10: mod_base = OTHER; note = Triphenylmethyl modified nucleotide
  modified_base 1..10: mod_base = OTHER; note = Phosphorodiamidate morpholino backbone
cctcacctgt

SEQ ID NO: 377 - DNA, 10 bp, synthetic construct
  source 1..10: mol_type = other DNA
  modified_base 1..10: mod_base = OTHER; note = Phosphorodiamidate morpholino backbone
cctcacctgt

SEQ ID NO: 378 - DNA, 11 bp, synthetic construct
  source 1..11: mol_type = other DNA
  modified_base 11: mod_base = OTHER; note = Triphenylmethyl modified nucleotide
  modified_base 1..11: mod_base = OTHER; note = Phosphorodiamidate morpholino backbone
cctcacctgtc

SEQ ID NO: 379 - DNA, 11 bp, synthetic construct
  source 1..11: mol_type = other DNA
  modified_base 1..11: mod_base = OTHER; note = Phosphorodiamidate morpholino backbone
cctcacctgtc

SEQ ID NO: 380 - DNA, 12 bp, synthetic construct
  source 1..12: mol_type = other DNA
  modified_base 12: mod_base = OTHER; note = Triphenylmethyl modified nucleotide
  modified_base 1..12: mod_base = OTHER; note = Phosphorodiamidate morpholino backbone
cctcacctgtca

SEQ ID NO: 381 - DNA, 12 bp, synthetic construct
  source 1..12: mol_type = other DNA
  modified_base 1..12: mod_base = OTHER; note = Phosphorodiamidate morpholino backbone
cctcacctgtca

SEQ ID NO: 382 - DNA, 13 bp, synthetic construct
  source 1..13: mol_type = other DNA
  modified_base 13: mod_base = OTHER; note = Triphenylmethyl modified nucleotide
  modified_base 1..13: mod_base = OTHER; note = Phosphorodiamidate morpholino backbone
cctcacctgtcac

SEQ ID NO: 383 - DNA, 13 bp, synthetic construct
  source 1..13: mol_type = other DNA
  modified_base 1..13: mod_base = OTHER; note = Phosphorodiamidate morpholino backbone
cctcacctgtcac

SEQ ID NO: 384 - DNA, 14 bp, synthetic construct
  source 1..14: mol_type = other DNA
  modified_base 1..14: mod_base = OTHER; note = Phosphorodiamidate morpholino backbone
cctcacctgtcaca

SEQ ID NO: 385 - DNA, 14 bp, synthetic construct
  source 1..14: mol_type = other DNA
  modified_base 14: mod_base = OTHER; note = Triphenylmethyl modified nucleotide
  modified_base 1..14: mod_base = OTHER; note = Phosphorodiamidate morpholino backbone
cctcacctgtcaca

SEQ ID NO: 386 - DNA, 15 bp, synthetic construct
  source 1..15: mol_type = other DNA
  modified_base 15: mod_base = OTHER; note = Triphenylmethyl modified nucleotide
  modified_base 1..15: mod_base = OTHER; note = Phosphorodiamidate morpholino backbone
cctcacctgtcacat

SEQ ID NO: 387 - DNA, 15 bp, synthetic construct
  source 1..15: mol_type = other DNA
  modified_base 1..15: mod_base = OTHER; note = Phosphorodiamidate morpholino backbone
cctcacctgtcacat

SEQ ID NO: 388 - DNA, 16 bp, synthetic construct
  source 1..16: mol_type = other DNA
  modified_base 16: mod_base = OTHER; note = Triphenylmethyl modified nucleotide
  modified_base 1..16: mod_base = OTHER; note = Phosphorodiamidate morpholino backbone
cctcacctgtcacatg

SEQ ID NO: 389 - DNA, 16 bp, synthetic construct
  source 1..16: mol_type = other DNA
  modified_base 1..16: mod_base = OTHER; note = Phosphorodiamidate morpholino backbone
cctcacctgtcacatg

SEQ ID NO: 390 - DNA, 17 bp, synthetic construct
  source 1..17: mol_type = other DNA
  modified_base 17: mod_base = OTHER; note = Triphenylmethyl modified nucleotide
  modified_base 1..17: mod_base = OTHER; note = Phosphorodiamidate morpholino backbone
cctcacctgtcacatgc

SEQ ID NO: 391 - DNA, 17 bp, synthetic construct
  source 1..17: mol_type = other DNA
  modified_base 1..17: mod_base = OTHER; note = Phosphorodiamidate morpholino backbone
cctcacctgtcacatgc

SEQ ID NO: 392 - DNA, 18 bp, synthetic construct
  source 1..18: mol_type = other DNA
  modified_base 18: mod_base = OTHER; note = Triphenylmethyl modified nucleotide
  modified_base 1..18: mod_base = OTHER; note = Phosphorodiamidate morpholino backbone
cctcacctgtcacatgca

SEQ ID NO: 393 - DNA, 18 bp, synthetic construct
  source 1..18: mol_type = other DNA
  modified_base 1..18: mod_base = OTHER; note = Phosphorodiamidate morpholino backbone
cctcacctgtcacatgca

SEQ ID NO: 394 - DNA, 19 bp, synthetic construct
  source 1..19: mol_type = other DNA
  modified_base 19: mod_base = OTHER; note = Triphenylmethyl modified nucleotide
  modified_base 1..19: mod_base = OTHER; note = Phosphorodiamidate morpholino backbone
cctcacctgtcacatgcac

SEQ ID NO: 395 - DNA, 19 bp, synthetic construct
  source 1..19: mol_type = other DNA
  modified_base 1..19: mod_base = OTHER; note = Phosphorodiamidate morpholino backbone
cctcacctgtcacatgcac

SEQ ID NO: 396 - DNA, 20 bp, synthetic construct
  source 1..20: mol_type = other DNA
  modified_base 20: mod_base = OTHER; note = Triphenylmethyl modified nucleotide
  modified_base 1..20: mod_base = OTHER; note = Phosphorodiamidate morpholino backbone
cctcacctgtcacatgcaca

SEQ ID NO: 397 - DNA, 20 bp, synthetic construct
  source 1..20: mol_type = other DNA
  modified_base 1..20: mod_base = OTHER; note = Phosphorodiamidate morpholino backbone
cctcacctgtcacatgcaca

SEQ ID NO: 398 - DNA, 21 bp, synthetic construct
  source 1..21: mol_type = other DNA
  modified_base 21: mod_base = OTHER; note = Triphenylmethyl modified nucleotide
  modified_base 1..21: mod_base = OTHER; note = Phosphorodiamidate morpholino backbone
cctcacctgtcacatgcacag

SEQ ID NO: 399 - DNA, 21 bp, synthetic construct
  source 1..21: mol_type = other DNA
  modified_base 1..21: mod_base = OTHER; note = Phosphorodiamidate morpholino backbone
cctcacctgtcacatgcacag

SEQ ID NO: 400 - DNA, 22 bp, synthetic construct
  source 1..22: mol_type = other DNA
  modified_base 22: mod_base = OTHER; note = Triphenylmethyl modified nucleotide
  modified_base 1..22: mod_base = OTHER; note = Phosphorodiamidate morpholino backbone
cctcacctgtcacatgcacaga

SEQ ID NO: 401 - DNA, 22 bp, synthetic construct
  source 1..22: mol_type = other DNA
  modified_base 1..22: mod_base = OTHER; note = Phosphorodiamidate morpholino backbone
cctcacctgtcacatgcacaga

SEQ ID NO: 402 - DNA, 23 bp, synthetic construct
  source 1..23: mol_type = other DNA
  modified_base 23: mod_base = OTHER; note = Triphenylmethyl modified nucleotide
  modified_base 1..23: mod_base = OTHER; note = Phosphorodiamidate morpholino backbone
cctcacctgtcacatgcacagag

SEQ ID NO: 403 - DNA, 23 bp, synthetic construct
  source 1..23: mol_type = other DNA
  modified_base 1..23: mod_base = OTHER; note = Phosphorodiamidate morpholino backbone
cctcacctgtcacatgcacagag

SEQ ID NO: 404 - DNA, 24 bp, synthetic construct
  source 1..24: mol_type = other DNA
  modified_base 24: mod_base = OTHER; note = Triphenylmethyl modified nucleotide
  modified_base 1..24: mod_base = OTHER; note = Phosphorodiamidate morpholino backbone
cctcacctgtcacatgcacagaga

SEQ ID NO: 405 - DNA, 24 bp, synthetic construct
  source 1..24: mol_type = other DNA
  modified_base 1..24: mod_base = OTHER; note = Phosphorodiamidate morpholino backbone
cctcacctgtcacatgcacagaga

SEQ ID NO: 406 - DNA, 25 bp, synthetic construct
  source 1..25: mol_type = other DNA
  modified_base 25: mod_base = OTHER; note = Triphenylmethyl modified nucleotide
  modified_base 1..25: mod_base = OTHER; note = Phosphorodiamidate morpholino backbone
cctcacctgtcacatgcacagagag

SEQ ID NO: 407 - DNA, 25 bp, synthetic construct
  source 1..25: mol_type = other DNA
  modified_base 1..25: mod_base = OTHER; note = Phosphorodiamidate morpholino backbone
cctcacctgtcacatgcacagagag

SEQ ID NO: 408 - DNA, 21 bp, synthetic construct
  source 1..21: mol_type = other DNA
  modified_base 1: mod_base = OTHER; note = Sarcosine attached via phosphorodiamidate to nucleotide
  modified_base 21: mod_base = OTHER; note = Triphenylmethyl modified nucleotide
  modified_base 1..21: mod_base = OTHER; note = Phosphorodiamidate morpholino backbone
cctcacctgtcacatgcacag

SEQ ID NO: 409 - DNA, 25 bp, synthetic construct
  source 1..25: mol_type = other DNA
  modified_base 1: mod_base = OTHER; note = Sarcosine attached via phosphorodiamidate to nucleotide
  modified_base 25: mod_base = OTHER; note = Dibenzocyclooctyne modified nucleotide
  modified_base 1..25: mod_base = OTHER; note = Phosphorodiamidate morpholino backbone
cctcacctgtcacatgcacagagag

SEQ ID NO: 410 - DNA, 25 bp, synthetic construct
  source 1..25: mol_type = other DNA
  modified_base 1: mod_base = OTHER; note = Sarcosine attached via phosphorodiamidate to nucleotide
  modified_base 25: mod_base = OTHER; note = Bicyclononyne modified nucleotide
  modified_base 1..25: mod_base = OTHER; note = Phosphorodiamidate morpholino backbone
cctcacctgtcacatgcacagagag

SEQ ID NO: 411 - protein, 7 aa, synthetic construct
  SITE 1: note = D-amino acid
  SITE 2: note = 2-Naphthylalanine
  SITE 4: note = D-amino acid
  SITE 6: note = D-amino acid
  SITE 7: note = 5-Aminopentanoic acid with a 2x polyethylene glycol linker attached to side chain of Glutamine
FXRRRRQ

SEQ ID NO: 412 - protein, 7 aa, synthetic construct
  SITE 1: note = D-amino acid
  SITE 2: note = 2-Naphthylalanine
  SITE 4: note = D-amino acid
  SITE 6: note = D-amino acid
  SITE 7: note = Lysine with a 2x polyethylene glycol linker attached to side chain of Glutamine
FXRRRRQ

SEQ ID NO: 413 - protein, 7 aa, synthetic construct
  SITE 1: note = D-amino acid
  SITE 2: note = 2-Naphthylalanine
  SITE 4: note = D-amino acid
  SITE 6: note = D-amino acid
  SITE 7: note = 5-Aminopentanoic acid with a 2x polyethylene glycol linker attached to side chain of Glutamine
KXRRRRQ

SEQ ID NO: 414 - protein, 7 aa, synthetic construct
  SITE 1: note = D-amino acid
  SITE 2: note = 2-Naphthylalanine
  SITE 4: note = D-amino acid
  SITE 6: note = D-amino acid
  SITE 7: note = 5-Aminopentanoic acid with a 2x polyethylene glycol linker attached to side chain of Glutamine
FXRRRKQ

SEQ ID NO: 415 - DNA, 25 bp, synthetic construct
  source 1..25: mol_type = other DNA
  modified_base 1: mod_base = OTHER; note = Sarcosine attached via phosphorodiamidate to nucleotide
  misc_feature 25: note = Nucleotide is attached via a dibenzocyclooctyne linker to the C-terminus of SEQ ID NO: 416
  modified_base 1..25: mod_base = OTHER; note = Phosphorodiamidate morpholino backbone
cctcacctgtcacatgcacagagag

SEQ ID NO: 416 - protein, 23 aa, synthetic construct
  SITE 2: note = 6-aminohexanoic acid
  SITE 5: note = Beta-alanine
  SITE 8: note = 6-aminohexanoic acid
  SITE 16: note = 6-aminohexanoic acid
  SITE 18: note = Beta-alanine
  SITE 20: note = 6-aminohexanoic acid
  SITE 22: note = Beta-alanine
  SITE 23: note = Residue is attached via a dibenzocyclooctyne linker to the 3' end of SEQ ID NO: 415
RXRRXRRXRYQFLIRXRXRXRXK

SEQ ID NO: 417 - DNA, 25 bp, synthetic construct
  source 1..25: mol_type = other DNA
  modified_base 1: mod_base = OTHER; note = Sarcosine attached via phosphorodiamidate to nucleotide
  misc_feature 25: note = Nucleotide is attached via a dibenzocyclooctyne linker to the C-terminus of SEQ ID NO: 418
  modified_base 1..25: mod_base = OTHER; note = Phosphorodiamidate morpholino backbone
cctcacctgtcacatgcacagagag

SEQ ID NO: 418 - protein, 15 aa, synthetic construct
  SITE 2: note = 6-aminohexanoic acid
  SITE 5: note = Beta-alanine
  SITE 8: note = 6-aminohexanoic acid
  SITE 11: note = Beta-alanine
  SITE 13: note = 6-aminohexanoic acid
  SITE 14: note = Beta-alanine
  SITE 15: note = Residue is attached via a dibenzocyclooctyne linker to the 3' end of SEQ ID NO: 417
RXRRXRRXRRXRXXK

SEQ ID NO: 419 - DNA, 25 bp, synthetic construct
  source 1..25: mol_type = other DNA
  modified_base 1: mod_base = OTHER; note = Sarcosine attached via phosphorodiamidate to nucleotide
  misc_feature 25: note = Nucleotide is attached via a bicyclononyne linker to the C-terminus of SEQ ID NO: 420
  modified_base 1..25: mod_base = OTHER; note = Phosphorodiamidate morpholino backbone
cctcacctgtcacatgcacagagag

SEQ ID NO: 420 - protein, 13 aa, synthetic construct
  SITE 1: note = Acetylated residue
  SITE 11: note = 6-aminohexanoic acid
  SITE 12: note = Beta-alanine
  SITE 13: note = Residue is attached via a bicyclononyne linker to the 3' end of SEQ ID NO: 419
LRKLRKRLLRXXK

SEQ ID NO: 421 - DNA, 25 bp, synthetic construct
  source 1..25: mol_type = other DNA
  modified_base 1: mod_base = OTHER; note = Sarcosine attached via phosphorodiamidate to nucleotide
  misc_feature 25: note = Nucleotide is attached via a bicyclononyne linker to the C-terminus of SEQ ID NO: 422
  modified_base 1..25: mod_base = OTHER; note = Phosphorodiamidate morpholino backbone
cctcacctgtcacatgcacagagag

SEQ ID NO: 422 - protein, 13 aa, synthetic construct
  SITE 1: note = Azidoacetyl Lysine
  SITE 13: note = Residue is attached via a bicyclononyne linker to the 3' end of SEQ ID NO: 421
KLYENKPRRPYIL

SEQ ID NO: 423 - DNA, 25 bp, synthetic construct
  source 1..25: mol_type = other DNA
  modified_base 1: mod_base = OTHER; note = Sarcosine attached via phosphorodiamidate to nucleotide
  misc_feature 25: note = Nucleotide is attached via a dibenzocyclooctyne linker to the C-terminus of SEQ ID NO: 424
  modified_base 1..25: mod_base = OTHER; note = Phosphorodiamidate morpholino backbone
cctcacctgtcacatgcacagagag

SEQ ID NO: 424 - protein, 22 aa, synthetic construct
  SITE 1: note = Azidoacetyl Lysine
  SITE 22: note = Residue is attached via a dibenzocyclooctyne linker to the 3' end of SEQ ID NO: 423
KPPPAGSSPGLYENKPRRPYIL

SEQ ID NO: 425 - DNA, 25 bp, synthetic construct
  source 1..25: mol_type = other DNA
  modified_base 1: mod_base = OTHER; note = Sarcosine attached via phosphorodiamidate to nucleotide
  misc_feature 25: note = Nucleotide is attached via an amide bond to the C-terminus of SEQ ID NO: 426
  modified_base 1..25: mod_base = OTHER; note = Phosphorodiamidate morpholino backbone
cctcacctgtcacatgcacagagag

SEQ ID NO: 426 - protein, 22 aa, synthetic construct
  SITE 1: note = Acetylated residue
  SITE 2: note = 6-aminohexanoic acid
  SITE 5: note = Beta-alanine
  SITE 8: note = 6-aminohexanoic acid
  SITE 16: note = 6-aminohexanoic acid
  SITE 18: note = Beta-alanine
  SITE 20: note = 6-aminohexanoic acid
  SITE 22: note = Beta-alanine is attached via an amide bond to the 3' end of SEQ ID NO: 425
RXRRXRRXRYQFLIRXRXRXRX

SEQ ID NO: 427 - DNA, 25 bp, synthetic construct
  source 1..25: mol_type = other DNA
  modified_base 1: mod_base = OTHER; note = Sarcosine attached via phosphorodiamidate to nucleotide
  misc_feature 25: note = Nucleotide is attached via an amide bond to the C-terminus of SEQ ID NO: 428
  modified_base 1..25: mod_base = OTHER; note = Phosphorodiamidate morpholino backbone
cctcacctgtcacatgcacagagag

SEQ ID NO: 428 - protein, 7 aa, synthetic construct
  SITE 1: note = D-amino acid
  SITE 2: note = 2-Naphthylalanine
  SITE 4: note = D-amino acid
  SITE 6: note = D-amino acid
  SITE 7: note = 5-Aminopentanoic acid with a 2x polyethylene glycol linker attached to side chain of glutamine which is attached via an amide bond to the 3' end of SEQ ID NO: 427
FXRRRRQ

SEQ ID NO: 429 - DNA, 21 bp, synthetic construct
  source 1..21: mol_type = other DNA
  modified_base 1: mod_base = OTHER; note = Sarcosine attached via phosphorodiamidate to nucleotide
  misc_feature 21: note = Nucleotide is attached via an amide bond to the C-terminus of SEQ ID NO: 430
  modified_base 1..21: mod_base = OTHER; note = Phosphorodiamidate morpholino backbone
cctcacctgtcacatgcacag

SEQ ID NO: 430 - protein, 7 aa, synthetic construct
  SITE 1: note = D-amino acid
  SITE 2: note = 2-Naphthylalanine
  SITE 4: note = D-amino acid
  SITE 6: note = D-amino acid
  SITE 7: note = 5-Aminopentanoic acid with a 2x polyethylene glycol linker attached to side chain of glutamine which is attached via an amide bond to the 3' end of SEQ ID NO: 429
FXRRRRQ

SEQ ID NO: 431 - DNA, 25 bp, synthetic construct
  source 1..25: mol_type = other DNA
  modified_base 1: mod_base = OTHER; note = Sarcosine attached via phosphorodiamidate to nucleotide
  misc_feature 25: note = Nucleotide is attached via an amide bond to the C-terminus of SEQ ID NO: 432
  modified_base 1..25: mod_base = OTHER; note = Phosphorodiamidate morpholino backbone
cctcacctgtcacatgcacagagag

SEQ ID NO: 432 - protein, 7 aa, synthetic construct
  SITE 1: note = D-amino acid
  SITE 2: note = 2-Naphthylalanine
  SITE 4: note = D-amino acid
  SITE 6: note = D-amino acid
  SITE 7: note = Lysine functionalized with (S)-lipoic acid at epsilon-N position via amide bond with a 2x polyethylene glycol linker attached to side chain of glutamine which is attached via an amide bond to the 3' end of SEQ ID NO: 431
FXRRRRQ

SEQ ID NO: 433 - DNA, 25 bp, synthetic construct
  source 1..25: mol_type = other DNA
  modified_base 1: mod_base = OTHER; note = Sarcosine attached via phosphorodiamidate to nucleotide
  misc_feature 25: note = Nucleotide is attached via an amide bond to the C-terminus of SEQ ID NO: 434
  modified_base 1..25: mod_base = OTHER; note = Phosphorodiamidate morpholino backbone
cctcacctgtcacatgcacagagag

SEQ ID NO: 434 - protein, 7 aa, synthetic construct
  SITE 1: note = D-Lysine functionalized with (S)-lipoic acid at epsilon-N position via amide bond
  SITE 2: note = 2-Naphthylalanine
  SITE 4: note = D-amino acid
  SITE 6: note = D-amino acid
  SITE 7: note = 5-Aminopentanoic acid with a 2x polyethylene glycol linker attached to side chain of glutamine which is attached via an amide bond to the 3' end of SEQ ID NO: 433
KXRRRRQ

SEQ ID NO: 435 - DNA, 25 bp, synthetic construct
  source 1..25: mol_type = other DNA
  modified_base 1: mod_base = OTHER; note = Sarcosine attached via phosphorodiamidate to nucleotide
  misc_feature 25: note = Nucleotide is attached via an amide bond to the C-terminus of SEQ ID NO: 436
  modified_base 1..25: mod_base = OTHER; note = Phosphorodiamidate morpholino backbone
cctcacctgtcacatgcacagagag

SEQ ID NO: 436 - protein, 7 aa, synthetic construct
  SITE 1: note = D-amino acid
  SITE 2: note = 2-Naphthylalanine
  SITE 4: note = D-amino acid
  SITE 6: note = D-Lysine functionalized with (S)-lipoic acid at epsilon-N position via amide bond
  SITE 7: note = 5-Aminopentanoic acid with a 2x polyethylene glycol linker attached to side chain of glutamine which is attached via an amide bond to the 3' end of SEQ ID NO: 435
FXRRRKQ

SEQ ID NO: 437 - DNA, 13 bp, synthetic construct
  source 1..13: mol_type = other DNA
  modified_base 13: mod_base = OTHER; note = 3' Biotin modified nucleotide
gtgacaggtgagg

SEQ ID NO: 438 - DNA, 10 bp, synthetic construct
  source 1..10: mol_type = other DNA
  modified_base 1: mod_base = OTHER; note = 5' digoxigenin modified nucleotide
ctgtgcatgt

SEQ ID NO: 439 - DNA, 12 bp, synthetic construct
  source 1..12: mol_type = other DNA
  modified_base 1: mod_base = OTHER; note = 5' digoxigenin modified nucleotide
ctctctgtgcat

SEQ ID NO: 440 - DNA, 11 bp, synthetic construct
  source 1..11: mol_type = other DNA
  modified_base 11: mod_base = OTHER; note = 3' Biotin modified nucleotide
gacaggtgagg

SEQ ID NO: 441 - protein, 4 aa, synthetic construct
DEAD

SEQ ID NO: 442 - protein, 6 aa, synthetic construct
  VARIANT 1: note = D-Phenylalanine linked via oxadiazole with any substituent
  SITE 3: note = D-amino acid
  SITE 5: note = D-amino acid
FRRRRQ

SEQ ID NO: 443 - protein, 6 aa, synthetic construct
  SITE 1: note = D-Phenylalanine linked via oxadiazole with a phenyl group
  SITE 3: note = D-amino acid
  SITE 5: note = D-amino acid
FRRRRQ

SEQ ID NO: 444 - protein, 6 aa, synthetic construct
  SITE 1: note = D-Phenylalanine linked via oxadiazole with a 2-Naphthyl group
  SITE 3: note = D-amino acid
  SITE 5: note = D-amino acid
FRRRRQ

SEQ ID NO: 445 - protein, 7 aa, synthetic construct
  SITE 1: note = D-Phenylalanine linked via oxadiazole
  SITE 4: note = D-amino acid
  SITE 6: note = D-amino acid
FFRRRRQ

SEQ ID NO: 446 - protein, 7 aa, synthetic construct
  SITE 1: note = D-Phenylalanine linked via oxadiazole
  SITE 2: note = 2-Naphthylalanine
  SITE 4: note = D-amino acid
  SITE 6: note = D-amino acid
FXRRRRQ

SEQ ID NO: 447 - protein, 7 aa, synthetic construct
  SITE 1: note = D-Phenylalanine linked via oxadiazole with a phenyl group
  SITE 4: note = D-amino acid
  SITE 6: note = D-amino acid
FPRRRRQ

SEQ ID NO: 448 - protein, 7 aa, synthetic construct
  SITE 1: note = D-Phenylalanine linked via oxadiazole with a 2-Naphthyl group
  SITE 4: note = D-amino acid
  SITE 6: note = D-amino acid
FPRRRRQ

SEQ ID NO: 449 - protein, 8 aa, synthetic construct
  SITE 1: note = D-Phenylalanine linked via oxadiazole
  SITE 5: note = D-amino acid
  SITE 7: note = D-amino acid
FFPRRRRQ

SEQ ID NO: 450 - protein, 8 aa, synthetic construct
  SITE 1: note = D-Phenylalanine linked via oxadiazole
  SITE 2: note = 2-Naphthylalanine
  SITE 5: note = D-amino acid
  SITE 7: note = D-amino acid
FXPRRRRQ

SEQ ID NO: 451 - protein, 8 aa, synthetic construct
  SITE 2: note = D-amino acid
  SITE 3: note = 2-Naphthylalanine
  SITE 5: note = D-amino acid
  SITE 7: note = D-amino acid
  SITE 8: note = 5-Aminopentanoic acid with a 2x polyethylene glycol linker attached to side chain of Glutamine
FFXRRRRQ

SEQ ID NO: 452 - DNA, 25 bp, synthetic construct
  source 1..25: mol_type = other DNA
  modified_base 1: mod_base = OTHER; note = Sarcosine attached via phosphorodiamidate to nucleotide
  misc_feature 25: note = Nucleotide is attached via an amide bond to the C-terminus of SEQ ID NO: 453
  modified_base 1..25: mod_base = OTHER; note = Phosphorodiamidate morpholino backbone
cctcacctgtcacatgcacagagag

SEQ ID NO: 453 - protein, 8 aa, synthetic construct
  SITE 2: note = D-amino acid
  SITE 3: note = 2-Naphthylalanine
  SITE 5: note = D-amino acid
  SITE 7: note = D-amino acid
  SITE 8: note = 5-Aminopentanoic acid with a 2x polyethylene glycol linker attached to side chain of glutamine which is attached via an amide bond to the 3' end of SEQ ID NO: 452
FFXRRRRQ

SEQ ID NO: 454 - DNA, 21 bp, synthetic construct
  source 1..21: mol_type = other DNA
  modified_base 1: mod_base = OTHER; note = Sarcosine attached via phosphorodiamidate to nucleotide
  misc_feature 21: note = Nucleotide is attached via an amide bond to the C-terminus of SEQ ID NO: 455
  modified_base 1..21: mod_base = OTHER; note = Phosphorodiamidate morpholino backbone
cctcacctgtcacatgcacag

SEQ ID NO: 455 - protein, 8 aa, synthetic construct
  SITE 2: note = D-amino acid
  SITE 3: note = 2-Naphthylalanine
  SITE 5: note = D-amino acid
  SITE 7: note = D-amino acid
  SITE 8: note = 5-Aminopentanoic acid with a 2x polyethylene glycol linker attached to side chain of glutamine which is attached via an amide bond to the 3' end of SEQ ID NO: 454
FFXRRRRQ

SEQ ID NO: 456 - protein, 7 aa, synthetic construct
  SITE 1: note = D-amino acid
  SITE 2: note = 2-Naphthylalanine
  SITE 4: note = D-amino acid
  SITE 6: note = D-amino acid
  SITE 7: note = Cysteine attached to side chain of Glutamine
FXRRRRQ

SEQ ID NO: 457 - protein, 6 aa, synthetic construct
  SITE 1: note = D-amino acid
  SITE 2: note (2R,6R,7R)-7-amino-8-oxo-6-phenylazocane-2-carboxylic acid
  SITE 3: note = D-amino acid
  SITE 5: note = D-amino acid
  SITE 6: note = Cysteine attached to side chain of Glutamine
FXRRRQ

SEQ ID NO: 458 - protein, 6 aa, synthetic construct
  SITE 1: note (2R,6R,7R)-7-amino-8-oxo-6-phenylazocane-2-carboxylic acid
  SITE 3: note = D-amino acid
  SITE 5: note = D-amino acid
  SITE 6: note = Cysteine attached to side chain of Glutamine
XRRRRQ

SEQ ID NO: 459 - protein, 7 aa, synthetic construct
  SITE 1: note = D-amino acid
  SITE 2: note = 2-Naphthylalanine
  SITE 4: note = D-amino acid
  SITE 6: note = D-amino acid
  SITE 7: note = Cysteine linked with a disulfide bond to 4-Methylumbelliferone attached to side chain of Glutamine
FXRRRRQ

SEQ ID NO: 460 - protein, 6 aa, synthetic construct
  SITE 1: note = D-amino acid
  SITE 2: note (2R,6R,7R)-7-amino-8-oxo-6-phenylazocane-2-carboxylic acid
  SITE 3: note = D-amino acid
  SITE 5: note = D-amino acid
  SITE 6: note = Cysteine linked with a disulfide bond to 4-Methylumbelliferone attached to side chain of Glutamine
FXRRRQ

SEQ ID NO: 461 - protein, 6 aa, synthetic construct
  SITE 1: note (2R,6R,7R)-7-amino-8-oxo-6-phenylazocane-2-carboxylic acid
  SITE 3: note = D-amino acid
  SITE 5: note = D-amino acid
  SITE 6: note = Cysteine linked with a disulfide bond to 4-Methylumbelliferone attached to side chain of Glutamine
XRRRRQ

SEQ ID NO: 462 - protein, 6 aa, synthetic construct
  SITE 1: note = D-amino acid
  SITE 2: note (2R,6R,7R)-7-amino-8-oxo-6-phenylazocane-2-carboxylic acid
  SITE 3: note = D-amino acid
  SITE 5: note = D-amino acid
  SITE 6: note = Cysteine linked with a disulfide bond to an azide linker attached to side chain of Glutamine
FXRRRQ

SEQ ID NO: 463 - protein, 6 aa, synthetic construct
  SITE 1: note (2R,6R,7R)-7-amino-8-oxo-6-phenylazocane-2-carboxylic acid
  SITE 3: note = D-amino acid
  SITE 5: note = D-amino acid
  SITE 6: note = Cysteine linked with a disulfide bond to an azide linker attached to side chain of Glutamine
XRRRRQ

SEQ ID NO: 464 - DNA, 21 bp, synthetic construct
  source 1..21: mol_type = other DNA
  modified_base 1: mod_base = OTHER; note = Sarcosine attached via phosphorodiamidate to nucleotide
  misc_feature 21: note = Bicyclononyne modified nucleotide attached via an amide bond to the C-terminus of SEQ ID NO: 465
  modified_base 1..21: mod_base = OTHER; note = Phosphorodiamidate morpholino backbone
cctcacctgtcacatgcacag

SEQ ID NO: 465 - protein, 6 aa, synthetic construct
  SITE 1: note = D-amino acid
  SITE 2: note (2R,6R,7R)-7-amino-8-oxo-6-phenylazocane-2-carboxylic acid
  SITE 3: note = D-amino acid
  SITE 5: note = D-amino acid
  SITE 6: note = Cysteine linked with a disulfide bond to an azide linker attached to side chain of Glutamine which is attached via an amide bond to the 3' end of SEQ ID NO: 464
FXRRRQ

SEQ ID NO: 466 - DNA, 21 bp, synthetic construct
  source 1..21: mol_type = other DNA
  modified_base 1: mod_base = OTHER; note = Sarcosine attached via phosphorodiamidate to nucleotide
  misc_feature 21: note = Bicyclononyne modified nucleotide attached via an amide bond to the C-terminus of SEQ ID NO: 467
  modified_base 1..21: mod_base = OTHER; note = Phosphorodiamidate morpholino backbone
cctcacctgtcacatgcacag

SEQ ID NO: 467 - protein, 6 aa, synthetic construct
  SITE 1: note (2R,6R,7R)-7-amino-8-oxo-6-phenylazocane-2-carboxylic acid
  SITE 3: note = D-amino acid
  SITE 5: note = D-amino acid
  SITE 6: note = Cysteine linked with a disulfide bond to an azide linker attached to side chain of Glutamine which is attached via an amide bond to the 3' end of SEQ ID NO: 466
XRRRRQ

SEQ ID NO: 468 - protein, 6 aa, synthetic construct
  SITE 1: note (2R,3R,6R,7R)-7-amino-3-(naphthalen-2-yl)-8-oxo-6-phenylazo cane-2-carboxylic acid
  SITE 3: note = D-amino acid
  SITE 5: note = D-amino acid
  SITE 6: note = 5-Aminopentanoic acid with a 2x polyethylene glycol linker attached to side chain of Glutamine
XRRRRQ

SEQ ID NO: 469 - protein, 6 aa, synthetic construct
  SITE 1: note (2S,3S,6S,7S)-7-amino-3-(naphthalen-2-yl)-8-oxo-6-phenylazo cane-2-carboxylic acid
  SITE 3: note = D-amino acid
  SITE 5: note = D-amino acid
  SITE 6: note = 5-Aminopentanoic acid with a 2x polyethylene glycol linker attached to side chain of Glutamine
XRRRRQ

SEQ ID NO: 470 - protein, 6 aa, synthetic construct
  SITE 1: note = D-amino acid
  SITE 2: note (2R,3R,6R,7R)-7-amino-3-(naphthalen-2-yl)-8-oxo-6-phenylazo cane-2-carboxylic acid
  SITE 3: note = D-amino acid
  SITE 5: note = D-amino acid
  SITE 6: note = 5-Aminopentanoic acid with a 2x polyethylene glycol linker attached to side chain of Glutamine
FXRRRQ

SEQ ID NO: 471 - protein, 6 aa, synthetic construct
  SITE 1: note = D-amino acid
  SITE 2: note (2S,3S,6S,7S)-7-amino-3-(naphthalen-2-yl)-8-oxo-6-phenylazo cane-2-carboxylic acid
  SITE 3: note = D-amino acid
  SITE 5: note = D-amino acid
  SITE 6: note = 5-Aminopentanoic acid with a 2x polyethylene glycol linker attached to side chain of Glutamine
FXRRRQ

SEQ ID NO: 472 - DNA, 21 bp, synthetic construct
  source 1..21: mol_type = other DNA
  modified_base 1: mod_base = OTHER; note = Sarcosine attached via phosphorodiamidate to nucleotide
  misc_feature 21: note = Nucleotide is attached via an amide bond to the C-terminus of SEQ ID NO: 473
  modified_base 1..21: mod_base = OTHER; note = Phosphorodiamidate morpholino backbone
cctcacctgtcacatgcacag

SEQ ID NO: 473 - protein, 6 aa, synthetic construct
  SITE 1: note (2R,3R,6R,7R)-7-amino-3-(naphthalen-2-yl)-8-oxo-6-phenylazo cane-2-carboxylic acid
  SITE 3: note = D-amino acid
  SITE 5: note = D-amino acid
  SITE 6: note = 5-Aminopentanoic acid with a 2x polyethylene glycol linker attached to side chain of Glutamine which is attached via an amide bond to the 3' end of SEQ ID NO: 472
XRRRRQ

SEQ ID NO: 474 - DNA, 25 bp, synthetic construct
  source 1..25: mol_type = other DNA
  modified_base 1: mod_base = OTHER; note = Sarcosine attached via phosphorodiamidate to nucleotide
  misc_feature 25: note = Nucleotide is attached via an amide bond to the C-terminus of SEQ ID NO: 475
  modified_base 1..25: mod_base = OTHER; note = Phosphorodiamidate morpholino backbone
cctcacctgtcacatgcacagagag

SEQ ID NO: 475 - protein, 6 aa, synthetic construct
  SITE 1: note (2S,3S,6S,7S)-7-amino-3-(naphthalen-2-yl)-8-oxo-6-phenylazo cane-2-carboxylic acid
  SITE 3: note = D-amino acid
  SITE 5: note = D-amino acid
  SITE 6: note = 5-Aminopentanoic acid with a 2x polyethylene glycol linker attached to side chain of Glutamine which is attached via an amide bond to the 3' end of SEQ ID NO: 474
XRRRRQ

SEQ ID NO: 476 - DNA, 21 bp, synthetic construct
  source 1..21: mol_type = other DNA
  modified_base 1: mod_base = OTHER; note = Sarcosine attached via phosphorodiamidate to nucleotide
  misc_feature 21: note = Nucleotide is attached via an amide bond to the C-terminus of SEQ ID NO: 477
  modified_base 1..21: mod_base = OTHER; note = Phosphorodiamidate morpholino backbone
cctcacctgtcacatgcacag

SEQ ID NO: 477 - protein, 6 aa, synthetic construct
  SITE 1: note = D-amino acid
  SITE 2: note (2R,3R,6R,7R)-7-amino-3-(naphthalen-2-yl)-8-oxo-6-phenylazo cane-2-carboxylic acid
  SITE 3: note = D-amino acid
  SITE 5: note = D-amino acid
  SITE 6: note = 5-Aminopentanoic acid with a 2x polyethylene glycol linker attached to side chain of Glutamine which is attached via an amide bond to the 3' end of SEQ ID NO: 476
FXRRRQ

SEQ ID NO: 478 - DNA, 21 bp, synthetic construct
  source 1..21: mol_type = other DNA
  modified_base 1: mod_base = OTHER; note = Sarcosine attached via phosphorodiamidate to nucleotide
  misc_feature 21: note = Nucleotide is attached via an amide bond to the C-terminus of SEQ ID NO: 479
  modified_base 1..21: mod_base = OTHER; note = Phosphorodiamidate morpholino backbone
cctcacctgtcacatgcacag

SEQ ID NO: 479 - protein, 6 aa, synthetic construct
  SITE 1: note = D-amino acid
  SITE 2: note (2S,3S,6S,7S)-7-amino-3-(naphthalen-2-yl)-8-oxo-6-phenylazo cane-2-carboxylic acid
  SITE 3: note = D-amino acid
  SITE 5: note = D-amino acid
  SITE 6: note = 5-Aminopentanoic acid with a 2x polyethylene glycol linker attached to side chain of Glutamine which is attached via an amide bond to the 3' end of SEQ ID NO: 478
FXRRRQ

SEQ ID NO: 480 - protein, 6 aa, synthetic construct
  SITE 2: note = D-amino acid
  SITE 4: note = D-amino acid
  SITE 6: note = D-amino acid
RRRRQF

SEQ ID NO: 481 - protein, 6 aa, synthetic construct
  VARIANT 1: note = D-Phenylalanine linked via oxadiazole with a Phenyl, 2-Naphthyl, CH2Phenyl, or CH2(2-Naphthyl) group
  SITE 3: note = D-amino acid
  SITE 5: note = D-amino acid
FRRRRQ

SEQ ID NO: 482 - protein, 7 aa, synthetic construct
  SITE 3: note = D-amino acid
  SITE 5: note = D-amino acid
  SITE 7: note = D-amino acid
PRRRRQF

SEQ ID NO: 483 - protein, 7 aa, synthetic construct
  VARIANT 1: note = D-Phenylalanine linked via oxadiazole with a Phenyl, 2-Naphthyl, CH2Phenyl, or CH2(2-Naphthyl) group
  SITE 4: note = D-amino acid
  SITE 6: note = D-amino acid
FPRRRRQ